United States Patent Application Publication US 2015/0284798 A1 - sequence listing, part 2

SEQ ID NO: 13 - DNA, 73197 bp, Mus musculus
cgccctcctcctctcccctccctgctccttcaccgcttcctcctcctcctcctcctcctcgcccggccccagctgccagcaccatgtccgcagggggagattttgggaacccgctgcgaaaattcaagttggttttcctaggggagcagagcggtgagtactcggcttattctctcggctcggagccgagtcttttccccacgccgcccattcagccaccccactagggaccctcccagccctggctcgccaaggcccttccacgccccggtagaggagagggatgcagatggggagatggggctggctcgggtggggccgggctggggaggaccaagggggaaaggaagaaggtggttctgggggtcaagggatgagggtgagtgtgagatctgggtacgggtacccggtgcaggtgcgtccgggaggaccgagggcggcggctggctcacccgctctaggcgccgggctcgcgggctcgctgactagctcgcactgcggcacaggctgcggagcactgtgcaggtgtctgggtgccggcgagggtgtgggcgaagggacaggagcctctcttgggagaacgaggtggggctgggagctggttgcccccaccccaaggttgcgcccgaggggctccctgcggaccctgcctggaatctagggaaaggacgcgtccagctctggagcagattgctgctgggaaatggggaacacgacacctgtcccttttcgaaaagagtgggtgcaagtggtagggtaactgggcacttagcttctctggcttacatccgactgggcagaaggttctagactcactgtccttcactaatgtgttagcctctttggggcttaggggtgtggatcgtgagagtgaagattcttcccatagcaggtgacttgggggatggtacagaggcgtctcatatctgtgagcttggcactgggcagagaaaggcctaggcgacacgccctgcctggcttccctgccccctctagagagcatcagtggagccggtggattctcccaccccccatctcccagctcaccgcccttcttgggggaggggaggtcaccgtggcagccagccagagcctaaggagggggagagtaagggtttctttgctgcccaggagtctcccctcccaagtatctgacacccaggttggtccaaggtgggaagctcagacagaagagcagcgacccctctgatacctgtgggaaggagtacctccttgagagcctcggtccaggagtcacataaccagggggttacagacataagctgggcttctgagcatttctgctggaagagagggggatcccggggggggggggggcgggattcccagctctagctctgtaaaccagttctgttagctggtttggaggccaagaggaggaaggccgtgggaggacctggtgggcccaggcaccgtgcagctatgacgtgtgcgtgtgggctgtggaggtcacatggccacctcctgtctgctgatgctcagtacctgagctggagggttgggagccgggtggaagtcggggttgcctgtcccggagagctgggtttgggacatttcacatcgtacccagctcagctaggtagccagctggatctgattccctgtgctttgtagatcccaagtgtcacaaaggacacctccgttccttgctgtgtggaaaggattttgggagcacctcagccctaggagggagcctgcaggtgcacagcagccttggggggtggggggggctctcaactgtgttgtcatttgcctgattccaggcctcctggacactcagtttctgtctctgagtagtgggtagctggaagcagcccttatgcctcatgtttcccccagtgcctggactatgctggagttcaaagaatatttgttaattctaaatctgaacacagttccataaagaatcatatgtggtgagtttgaatgaaactctgggctcccttagcaactgctgatgggtggaacacacacacacacacacacacacacacacacgccacccccagtgagagttctgccaacccctccaggtctggagtcacagaagtgagagacagcctttcctcacatgctcatgtggagagagagtggggaggtcttgcccagagacccactgtgagttgtgaacactttgggagcaggaacccccacttccattttcccgtctgccatttttaactagagtgtcattgggaaataagatgaccttcaatgcggaaagccaagtctggaacctctttgagaggatttatgggctcagttagttggttgtggcctggtggaatgcttggctaattggttaggggcaggattcataggcccttggaacataatccatcattgtgttattagtgagttgtttaccgcgggtgtacagagcttgtggtgtctgtgagtctcagaagttatgtgtattccggagcctagtaggccgtggctgtaaccccttccatcttacctcctgacagtttgcatgccagcatcctctgcagcctgtgctgtggagggcggctcctgacatctggtccaaaccctacccaagctctcccttcctgtgtgatcacggagacccctcacgttccataccagggcacttgagccaactggaatccgaggcctaagcttccctatagaggccagctaatggagatgggggagggaggcgataaaagaggttgaaaggacacaaccttctcctgatctctattcctgacattgtggtagcatccctctaggcttgtggacagagacagctggattctaaagaggggtaccaggcttggagcaggctaaggtaggagataccctggaacagataatcataggtaggcatgaggccttcaaaggtaccgaggaactggttcaggtaggaagcctttgagtgcctgctctccggaacgcgcctctcgcctgtggactgtagtctgactggcagtgcctgtgtcacatggagtaggatcctggccaggtgctgtggacttagggtgaggtgtttccttgcgtcaggtaggtcatgcaatgctgctggccttcaggtcgctgtgtggcgcctcccgattagccctaacacgggtggcagtggtggcgaacccaagagggtggtgcacgccagactggtgtggagcatctgaaaaagacaggcaaagtctgagggagagtgggcctgcgaggtgtccatctttctcccaagttatcagagcctcccaggggatctggaccttaccagacacatcctggtgtgtgtggtgaggagggagggaaggaagagtggacagacatggggggaggggggctgtctgctttcccgggctgaggcagtaggccatccgtctctataggcctgagtacaaggagtaggggtagatttcagagaaacccctctctccttggcccagctctgcagaaagtgtaggtagaggcacgcctgtcaggagcgactctaaccttccgaacgctacagccctctaatgcagtttctcgtgtcgtggtgactcccagccataaacgcgttttgttgttgcttcataactgtaattttgctactgttatgaagagtaatgtcaatatctgatatacaggatagctgatacgtgatcccaaggaggtctcgactcacagatttgagaatgatgggattgctggcacccggttgagaccgtcctatacatcctcttcagctaagggttaagaaacaactgtccacagactgagccctgtttcctgcaaccaccccatgcagcacaaaccgtcctgtcctagcttggtggcaagcccactgtcccttttagaagcttttctcctttcaacttccaggcttgtcacatggacacagctttgattcttttaatgaacattaaaaaaaaaaacccaaaaccccacaaaactggttatgtgcagtcccatgacgcctcttctgtctcagctaggtaaggattttaatttaaggattttagggtgagttttaagcaccctaagtgggtgaccaaagcacgttgagaggattgtgtctgagtcatctcgctccctgctcccgtctgtgggctgtgcgtgctcaccgaggatcttgattcgaaaacgatgacatctttgatgtgagagatttgctgatggcctgtcagcagattaacagtgaagggaggtgaggcagctttgtgtggtgttcctggcacctggcactctctcaggccagattcttcttatcggggagttgacagttgctttgtcttgttttgtttttccagagaattgcatcattatgccatggtcatgcccaagcacctgagattctcaaagggttccccaactcccttaatatctctgaagaaatatggaggtggagtaggggctcctgtactaccagaggtggggaaggacacggcagaccagaccagatctcttggaggctcagactcaatccccatggtgttctgtgccttgctttctcatctcggtttttttccctcaccttctaatttctctctcccatccctctctcttgggtgctagtacaagagagagaaccttgggcgttgcgtatagacctacaacccttgattttttttccctatgtttaacaaagtgcgtcggaatgacacagacagtaagatgaggctgtctgtattccttctgttactataatgaaacacccgagtcaggccagctttataaggagagcagatttgtggagctcacactctggagggtcaaggacagggtgctggcattggctccattctggttgaggctctcataacagatgacatcatggttggggagtgattctgagggcacgaggtcatattaccacaggaagttagataacttcacaatccttccccaacactggctccaagggatcgaacccctcttagcaggttttcaggcttactctttgggggaggggttaggtgaaggtcaggggctaggaagatggacaagggtcttacacaggcctcactggctttgaactccctgtgtgaatggggataaccttgagttctcctcctcctccacctcctgagtgccagggattgaatctagggcctcatgcatgccagatgaagcaccaaatcccctggtcccgcctcttaaaggacccgctgccacatgaggactgagccacatccagaccagagacttaaaggttaaccctcgagagaaaaatgttgttatttataatcctcaaatgctcataaatcattttaaaatagaacaaaataacttcctgtcctttgcttccatagtgcacccctaaaaccagtctgtgttgccctgacattgcagaccatccttaacagacctgagagaagcggcctgtaggttacctccacctggctctccccacccaacttccgcacccagtgcctttcactgtggcttgacacaacagggctccttggtctcaatatgatgacattgttggccacaactgtctggggagctgaaaggtttcgtagaacagcaaaacataaacaggattgaactactgtgctggacactgtctgtctgtctgtctgtctgtctgtctgtggtcctttgttgtttcttgctgtgcagaagagatgatggaggagcccttgctggaggttgccaaggagaaggaccagacacgccctgagatgggcagctcttttgttcgagccagaaagacaagctgctgggaaacagctccaggcagggcctgggacttgaagtcccaaggggactgggaatggcaggcgctttgtttctagagccagggagcctccccccccccccccatgttggcttacttcgaagggctcctgaggaggtctgtattataggtctgggcttcagaaatgaaattttcttcattatttctataacttctgcttgaaacttaagagcgatcattttaaagagtaaaatttttgttgaatacttcttatcactttaataaagtagcttatttttagaagaaaaacatatttatcctgttctcttggtaacgagaccagtgggagtccaggtaactggggctacgtacctcggcctagcatcgtatccagggagtgatgtactcaagggacaggcctgggtcctgaagagtacagctgacagtgtggccctgaaggcagagttgattctttaaagtggtctccgagaaattcactgaagggctggttgcccgtgtccttcctctgtgaacctcaggtcaatgccccgggctctccaggggcactttgtaccttcctggtcactctgtgataatcatgcactgattgctattttgcggttcgtgaggctgcggcttggaaagagctggtcctgcctaccattagtgtaacaaattagagcttggagtgccggggtttgggggacagctgagtcaggagagtgcctgccttgccagcatgaatagctagccgagcttgagccccaaaactcacaaaaaaaagtcgagtgtggtggcagatgcttttaatcccagcactggggtggcagaggcaggtgtatccctgtggcttaccagccagccaacctggtctacgaggtgagctcaaggcctccgggtcaatgagagacgctgtttcatgaacctttggatcaggtcattatccaaggcagggccaggagtggggacagaagaatattgaggacttaaaagcagagtctgccatgaatgaatgactcagaacacctgtaccaaacactttgctaaagaggaaccagtagatcaccgtgtagctccactgaccatgaaggatgctggagccaaccacagggaggacaggctttggggaaggaggcaggcaagctccccacgaaggaggctggcagccctggcattgtgtggcaggcagtctgtctccccacacaaggaattgcttactttggatggcctggagagaaccaatagagaatcagccttcagcctacttctactggggacatgctgctggggactgttcccaacaaggggaaaaccagtcaaatgtggaccaagccctgctgggccttgtcttgctcctgggactgccgtgtcctggaaacacagatggtttttgccacctgttaaatgagcccctgctccactctggctcccaaggctcctgggtacagtggtttcttaggccagatgtcattcagtgctggcattaagcaagatgtcaggcttataatgatacttcagcctggagatgagcatgccgctggcgtgaggtgctgcggagaggctctcccgatgtgtgctttggtccatcctgtacttcctgtcaccagaaggcacttcttccacatacggatggccttagaggaaggcagcaaggaaggtacacctcccaggcactcggtgctcagcacagggagagagccagaaccaaggtgggtggtagtgaccttgcctaagctcctgctccgaccatcactgtgccggacctcctgagtcctgggcatctggcccgactcacccccgtcacttgtctgggtggtgtctggggtgcagtagaaccgtgcacactcgttctcctcagctggcatgaccttgctggaatttcacaaagatcaaacgcatgaacacacagcatgcaggtaaagctcgagtaccagctggctttgtcaataaaattgtgacggagcctccctctccccctcctcaccttgcagctgttagggaaggagtagagatgcatgaagcatttctgcaggtaggctgcacctcgcagccccgggacagcacatcccagttgacagctgcagagatggaggctctgagaggaggggcttctgtgtgcccagcagagcccaaaggcagaccccactccgcaggagagagactcaggcctctggctcagtgcttgcttgctcctgctcatcgcccgcagaggcgggaggcagcactgatataccagtttccccacgtgagggctacccataccctcatgagcacctcattctcactggcagaccacaggggcagaagctgctctggtgtgacctagaccgttcagatcagcctaaggtaagcgggaagaagccctggtccttataaataggaagcattagattcagaagcagagctatggctgtggtctgcttgagcaagtcgttttatggtgagtgggaaaggcctgtaggcatggggatgcggcagacacaagggccccctctgtgccaaggcaggagagggcttagggcccctgaagaactgaacaggttcagggctgctgggactctagtgccctgcaggtgtgggagagtagcaggtataagggttgaacctacagaagatggcagggccagcccgaagaggcctccttgccttcccacacttggtgtctgagcctttcctatagagagtggtgacccctggaggccgggacaggggaggcccatgctcatggattaggagacaaaggcagagtgtggcatatttgagggtccaagtgactgacctggggtcagacagggggcatttggggaagtgtaagcccagcttctgcctggctctctggcctactcagttgggtgggtctgttctctcagtttggtctgcagagacaagactcaagacaatgagatgaatgagggagggactcccagctttctccatactgccctcagatgtcctagaaccagcccctgggagctcccccatctacactgcctccacagcaacctggggtccctggatgctttggccttggtgacatgggtgtgacagtctgcagcagtccttccagacttccctctgcccgttgctctggcagatgtggcatctgatgcagtgacgatcgggctctgattagcctcctgccgttcctcctcttttgggggcccttgccacacacgtcctttgccttctcctgtgctgctttcctttaaggttaggagatttggtcgcacagcgcagatgaagagaaagtgctgttgtctgccttgacgactgaaacttaagcttaaactggctgctccaaaagccaaggtgtttgagagccagggaccagagtgagtggaggcagaggactgccactcttgaacccacccctagctgagaaagagcagcctattgggatcaaatgagaacaggttttcagatgacccatgacctctgctctcttcccttcctgcctcagtagtcttccaatgcaacggagcaccgcctggtatagctttggcagcatggctgtagttctgattggttcatttacaatgacagcatctcatagtgacactcgcccctttagcagcaccagatctatcatctctgtggtcagggtgggtgaggactcttctctgtgctggtgttcagcaggggaaagagggacaactttggccccttccagcctcccctgcaggtgtgggagctggagacccatccctggttctggaagagattgctgtaactgtgaccagcgcactaaagccaagtcccaggggacagtcagataagcttctggctcactctgagagtcccagtgaaacatcccaccttgaccctgtggtgagcaggaagtaggtcataggacagagcggtggagccatttaggacacgtttctcatttttttcccctcctgtccagtatagtgagcagccccggagggagccacaggtgtagccagagggaagagagaccacgggtgtgctgagtcagggagagtgtgcttcctgcttccagcacaggccaggctctgcggccacactaggtgtgccttcagggcttgctggcttcctgtgaggcttccagagccaagatgcttggtggttctaacgatgctatccatcctgggattctgaacaaagtccggttaaagactggaggttctgtcaaactgatgctgattcctgggctttgtatgttgtgactgtgaagggcaagaagaggagtggggcagcaatggaaaggaggactctgcctggtgctccctggagcacccccactgcctgagcactccctgtgtgtgttgcaccgtggggtgatgctaagcctcatctctccctcctccaggggtctgcgctgctgccgccgtgaccctgcagatgtacacttatctggccactgtaagagaatgcttccaaattgtttttaaaccctcggcatatcctgtgtgaagccctagaacctgtaaagttctgaattctgcctcactgggttcccttccccttctctacaccctaccataacactgcaggccactgcccagatcacaaggagcaggaggcctgacaaggcacctggccagtctcccgtcctgaacctttcctaaccacatcagaaaaatgccagagccccacctgtagagccaggaaaagtctgctcttctctagctctgagaacagaagagatgctagagctggcatcatctggtgtcttctggttggggggggcgggtatggcatgggggtctgggcagagggtgaccagtgcctggaccagtagacccttcagagaaatcctccattctgccttcatcccagcaggctgggagaaatatctgctggttaggagaacttgttccaggggatcagtccagatcacagcagtaggaaggggaagggaaccacttggtaagtggaaggcagcccgttactgtgagccccatgttctcagatgtccttctcctgagtgcagataggacttgggacttgctgctagcccgtacagtatggcaaaggtcgcgggaggtcactcatttaattgtgtcattgggaaaggtaacaagatatttgtccctggatggtttcattttatttattaattaaaatttactctctaacaattccacatgtgtatgcagtgtactttattcataaccacttactttcccaacttcagcctccccctccccccctcaggaccacgccaggtgacatcgtcccctgctcgccactatatttttttgaggcagggtctcccagtgaacctggagctcactgattggctagatttgctgttcggtgagccctgggcaatgttctgcctttgcctcctgtgctatgatttataggccaccgatagcttttcacacgggagctggggatccggtctcagatcctcatgctggtgtggcaagccctttctccactgagccatctccccagcccttcttggttggtctattagaaaactgtccctccgtgcttcggagaaataagctgccatgctttggataagtgtgtgtagagaggggctggaaactgtctgtggctgacctcgaacaagaaagtgtctccagttttataagcttggaggaggactctaacttcggaagagaaatacggtctggcagacaccatgtttgtgatcccgtgagacccgaagcagaaggtccttcaacccatgtctggactcctagctggcagggactgagagatcataaaagttcactgtttccagccattgtaacaattaccgatggcagtcggcacacagaaatagatagtttctacagaggagagaaagatcttagggtggggagatgcctttatcagagagggagtggcattctcaggagggacccctgaccagccctgagtcaagcagctacccaggcccaacctgtgaacccctgatgtgtgatctgcttatgttcttcatgtgttcctgtcttagtcggggtttctattcctgcacaaacatcatgaccaagaagcaagctggggaggaaagggtttattcagcttacacttccacattgctgttcatcaccaaaggaagtcaggactggaactcacgcaggtcaggaagcaggagctgatgcagaggccatggagggatgttacttactggcttgcttcccctggcttgctcagcctgctctcttatagaacccaagaccaccagcccagggatggcaccacccacaaggggccctcccacccttgatcactaattgagaaaatgctttacagctggatctcatggaggcatttcctcaactgaagctcctttctctgtgataactccagcttgtgtcaagttgacacacaaaaccagccagcagagttcccaaataaaccttgattcgtggcattgttccctgtcagatgcaggactagaacattctgtagggcctctgtcatgtccttgtgttctgaccccactctgatcgatggccctcccaggaaccaggtttattgtcccttaacctctctgctgacccttggcacttcccattgcatgtttacagtggagccttaacaagtgaagtcttcctggtctggtgacaccttggtgaccttgtgttttttatttttatttttttctttttgtgatttttcaagacagggtttttcttgtgtagccctggctgtcctggaactcactctgtagaccaggttggccttgaactcagaatctgcctgcctctgtctcccaagtgctgggattaaaggtgtgtgctaccactgcccggcgaccttgtggtttcatatcagcagcaaggacaagagtaaaaagaagagcttcggagggtgggtctcagttgttcattggaagagacagtgcctgcatgtggccctggttagacaggtggcttctgagggtgatttctccgttgtgcattggaagagatggtgcctggatgtggctttagttccgtaccccccattccttcctctggcttcacaactctctggtaagatctgcatcagagtcttctgtggtttgggccattatggggctgcttttaggaatggctccttagagaccttgagcttacagagtcagaagaagactaaacatttgctctggttccccgtttccccatccagtctagtgccggacaagcaaccatctgagttccacaaaactggaggagacacagcgatccttcctgtatcccagatggccgttatccactcacaggcccagggccctgaggtctccagtgtgtgttccttcctcatggtactttggcaggaggcctgcctctatgcaggtgtctgaggagcaggagatggtcaattttgtctgaatgggaggtctagaagtttctctcttgctctttttttttttttttttttaaagatttatttatttattatatgtaagtacactgtagctgtcttcagacactccagaagagggcgtcagatcttgttacaggtggttgtgagccaccatgtggttgctgggatttgaactcctgaccttcggcagagcagtcgggtgctcttacccactgagccatctcaccagccctctctcttgctcttgtgttcccctttatagctggcttgagcaaggtaggcctgagcctctatccacctcctcctgggccagctgaatgttgagctgctgtgtgagggtctgtaggaggacaggagaagaagcaagggcccacagaggcagcatcagaagcagccccctgtctggagactaagagcatcccagtttgcctcttggcacgatgctctacccctgtaccacagttcctttgagaagggagtagacttctgggaaggtgtttgccagcatcggtcttcaggtcccttccacatccctgagcaagctttatcccattgtcatgtcaaagtcgtgaccctagtttgaggagctttaggtagtcaaaagtctctctgacaacttaggatgcatagccatccatgcactctgtcctccatcttgccacctcacccctttcttgtattcctcagacttttagcatccacagcaccagccttgggaagaaaagggtgaatatgcccattactttgccaacattatggctggatgagccaagacacctattagataagctataagcttgcaatagcaggaacttacattatggctggatgagccaagacacctgttagataagccataaacttgcaatagcaggaacttcctaagggggcagtgggaatatagcattgctatctctcttctctgcagtatgttgtgttcgtggtgaaccagttctgcaccgcatggatgtgtggacacagttggcctggaggggctggctggagttgggctgagcctcagagcagttgaatgggagcacatttgcccattgcagtgtgacttttcctgggaagcccagggttgctatgggtacggtggatggggacctgccagtgtggtgtggctggcactcagatgtttttacttggccccagaaggaagacaccataccactctgaaattgctatgagtgtgcaatgcaatgaggcagaaaggattcagacctgggtaggtcagctgggagttctgcagcctacagagggtgccaagatctcgggagggtcttagaaaccgtgaaggtgatgtccttgatcatcagtcccagtagcgagaagcccagggaagtcaagacgtttccacatcgacccattgtattggccatatatgtgcatacactgtctgtatgtgtactacatacatctcaaatgtgcatacagcagtggcaccctgtgataagagctcccagcagccactgacctggctcagtcctgttcgtctatgaggcttgaataaatgtacagtaatattccagttccttaggaaaatttcatattcatcaggggatatgcagtccttaacagagtgaacagttctttcagaggacccaggtttggtttccagtgcccacattgggtggcttatgactactccaggggttctgatacccttactctggctccgggggttctgatacccttttctgtcctcctcaggtacttcactcactttgagtacatggcccctcacatacacgtgtactgaaacatgtacttaaaaataaaatcttacaatttttatattcagcagcacatttgtttaatcagacagaatgcaccatttcctaaatatatcgggtatctcagagactgtgtgtatataagcatatatgttacatattaatatataatatttcccctttgctgttcattttagcatacttttaagcttataaaaaagttacagaaataataccaaagcttcccgcctgccttttacccaggactcccaattttttaatttttacaactctcacagagttctccagacttttgtgagatagatatttctctctccattgaatgtctgaggaagctgaaacccagagaaggtggtaactgacataagatcacacagcagaccagaggcagaggcaagattaaaacccaagcccgttggtccttagagcatctgtgtgagcaatgaggctgtgtgactccgttgacgtctcctcttctgccctgtgtttcttttcttgtacagtagatctgcgagcagtgagttatctcatctcatctgtctttatctcacttacatttctgaaatggttttttttccccctgggggtagaatctggggctgccgatattttgaagatgccccttgctcactctgtcatggccactggagccctaggccagaggccaactctgaaggttccagtgggccaggtccctgtcacttactccaaagaaggcaggtgggatggcggagatgcagcaaggaaggatgttagtcagcactgctgtgcggggaagcagcctttgttaagcctgtgcagtctgtcttctggggacgactcgggctttaggtttaaagagagggagattgggagatacataagtaagcaggcttggttaaactggtctaggtgattatatcagttctggctctgccagctgactgaagtccttcaaggaggcttccaagggaagggacactgcaggcaggcattctgtccccaaggtatccaggtggtggcaggtttagagccgtgagtggctactttctggtacgttgtgtttcattcactttgtttggggtgggggagtagagtgtcttgaacagaactttgacaggaagatgtttttatctgcatgctttcaggcttgaagagagcgagatacgtcactgacgtttgcgcagaccgcccctgagtaactaacatgcctatgtgcagagttaggcaaagccggaacttgagtcggagcaggacctcactgtgtaagagaccagcctacttctgcctccagagggctgttgggattaaaggcggacaccagggtattcaactctgaccaagtttaagaccaaagaggaagatgtgaaagtgaaggcttttctcctgctttagttttagtctagtttttgcctcctggggccagtgaggagccaagtttcttggtaaacgcagtttccacctgcctgttgtatcgcttcagagtaacaaggactctcatagttctctcaggtttattgttatttttgtttaaatagttacctttaaagccacttaaatgacaaaagtcttggtatctgcccacgattgtcgattgtccttaactctcttttgtgtctgtgtgtttctacctagtgtcatttcctgtattcctgaagaatttcccagaacagtttttgtcatgaggatctgctagtgataaattctgttagcttttgtatgtttttagatagataggtaggtagatagatagatagatagatagatagatagatagatagatagatagatagatagatagatggatggatggatgatagacagagaggcctctttatcgtgccattgcttttaaggatattgtccctaggtatagaatcctacgttaatatttagtgtaagtttttactttcagaactgttttttttttaaaccttaggactgggaattgaatcagggcctagtgaatgttgagcactccgttgtcttcttgcttatatcgatttagggaagagctctgctgcccccttgtcttcgcatcttggtgtcaccgtccagctggcttgagcaccagaggcatgattggacaggtcagagtggaaggctggagcctcagacttggagcagtagccggagtcccataggggatgtgccccaccccccagcccaggccctgtgtatactttcagagatgtcttagggttttgctgctgtgaacagacaccgtgaccaaggcaagtctttaaaagacaacctttaattggggctggcttacaggttcagaagttcagtccattatcatcaaagcaggaacatggcagtgtccaggcagagctgagagttctacatcttcatctgaaggctgctagtggaagactgacttccagacagctagggtgagggtcttaaagcccatgcccacagggatacacctactccaacaaggccacatttccaaatagagccattccctgggccgagcacatacaaactatcacaagaggtttctgctaaccactggctctgtgcagctgggaaatggagcttcttggtggactcttctccccctcccctcccctcccctcccctcccctcccctcccctcccctcccctcccctccccttctctctctctctccccctccccactcctatctcacacttcagcctttgagacctccagtcacagatagagaagacactggacactgccctacagctagctccctggtattttgttcatgttgattcttttatagctcatctttgatagtgtttatcactgttcgaaagttcattgctgttctcttctgtgatgtgcaatcatctttgacatcatagttttcactgctgggattttgatttgtgtctttaaaaaccttttccttgtttctgtttaattttttggacatatggaatgcagcaataacagtctcatacgtaatgttgaaagaccctcgtttctggggagactcttgctcaagtcctgggatgagctgacgccccaataactcgagagaaaccgttcttgatgcaatatcacaggaggtttatttatcagcatgctgaggctgagctcgtaacccacacaggggcagaggagatgacccccagcagttgcagtcgagggtttttaaagaataaactgcaaggtgaggggaggataggaccacaaagaatggggaagctgagtaaacactgaaaaatggggatggtgaattacggctcatctctcacggaaaggttacaggctatctttggcaaacattcttggtcccttacactatgggtcaggcacctgggtgggtcacccagtggtcatcattctctcaggctgaaggcgaaagaacaaagaactccatgctaggcttcgtttctagggagtctaagaaacacattgagttgggggtcttacaatgtctttatctgctaattctactgcatcagtttgggtttggttccagctgatttttgtctctcctttttttccccccaaaaaaagatttatttatttatttactacatgtaagcacactgtagctgagttcagacactccagaaggaggcttcagatctcagtatggatgttattgaaccagcatgtggttgctgggatttgaactccagaccttcagaagagcagtcagtgctcttacccgctgagccatctcaccagcctttcttctctccttttatgttcccattttcaggcttctttgcatgcctggagttttgggttttttttttttaaggttttaattttttatatgtatgggtgttttgcctgcaggtatgtttgtgtaccacatgtgtgcccaggacccagaagatagcgtggaatcccctagaactacagttaaagatatttgtgggttctaggaattgaacacaggtttcctggaagagcagacagtgctcttagcctccgcacaacctctcctggtgattttcttttttaaattgttcaggtttattaattagaaggtgccatatcctgactctgtcttcaacaattatattccaggcttcttttctttctttctttctttctttctttctttctttctttcttttctttctttctttctttctttcttttttttttttcttttggttttttgagacagggtttctctgtatagctctggctgtcctggaactcactttgtagactaggctggcctcgaactcagaaatccacctgcctctgcctcccgagtgctgggattaaagtcgtgtgccaccatgccagtcttattttcgagagttatgaacaatcttttttggcacagggaaggaattatctaagtaattaaataagggcgggtactcctggcacactgtggttctaagcctgagaatacaactgttaccctcatgctggctaccccggctctcctctgccttcccaccacagtaagcaagcagccagaccttagttctgtcctttggcttcaggactctgggctgatgggaggaagtgggacgtcactaagattatgaagccctggggtaagaggattctgcccacagcagtaaaggagtcttttctagaacttccatcccacagtatattaaagtcaatttgggtcttaaagaccatttggctcagcctcaatggaataccaatgagccaaggcaaagccaagacgtgttcagggcacattggccaacttaggcctccatcatttgacaggcagctctggctgggtcttgatgattgagcaagtcactgttatatcaatgaacccatctcactcatgaacagtgcctttctcagttctggactgtttgtcccacatgtctgttgtgggacacagtgtctttatttcggtaacctgaggccttactctgcagagccaccttcaggcaagcccgtcctgtgtttctagttcctggtttcccttctttagcccttgaccatgtgatgtccccttcccttttgttgtccacgtctttcagtcactcagtcctgtacctactaccaccctgtatgcctcctgacctcaggtgatagaggttggggtcggggctctatgtcattccctgaccttgaactgagaaagcctcaggtcagagctcaagacctcttcctgatcctggcctgaggttggctttggcttgttttagtgtcgtagggttaaggaatgggacactcctgtagctcatgcaccccaaatcattcattctcacagtggggctggccaggagtaatgcccgaggtctatttaggattaggggagaagaagaaatctcagttaggtctgggtgggcagggatgatttggtgtgaaatctcttgaggctgtggggaaggagagatagaagcaaaactaacggcttgcgagctcccagagggctttggagggtaaagaatggactcagaaatgtgaagtactgcatagtagtctgtgtgggtactcaccccacttgatgctgggtctccagcgcttgctttatagcccccaagtttgtacctttgactggcatctccccatttcctccgaccgtgtgctccagcaatcacctgcaattctttgtcctctgtagattgaacatacaggtgagaccatgtggctgtgctgtgtctttttgtgtgcacagtattgtcattacaaaaaaagggtatcagtggcccatgcacacacataggcatgcacgcacacacatataccacaggcacacgtatacacatgccaggaaggaagctgtgttgtgatgaatacatcagctggattaactgccatatccctgcgtacatatctatagagagagggagttctgtcagagcatcacctcctatatgttaactctttatagcattgactcgtcagctatgcctccgtacacctgggggtggggaaagaatggcagctggagaacacacggatgagcatcatgcaggaaggtggcagagccctccctctgggcagccggaggcccgggttgggcacctttggaagagtctcacctacctcagcccttgggcagctcttccctccaattaactttctactgaaggaggagccactggaaaagaagcaagacagccaagagtgtatgtgtaaaatgggaaactgaggctgggcctcccaaggcactgtctggtggccgtgtgcaggcttagcaatccattgtcattatgtcacagagctttgaggagggtgtctggaagactgaccacagcatacctcaggctcctagacaagggaagcaggcttgtctgtagtattagactttgtggggaacaaggaacttttattttgcccttctggtttctgccttatcctgtctacatggctgaagagtgggtttcttttttatttgacagcattttatttttaattcttctattaattcatcatcactattgaaattatgtatatgtgtccaagaaggccagaggtatcagatcccctggatctggaactggagataaaggtagctgtgagccaccggacatgggtgccaggaaccaagctccggtcctctgcaagagctgtaagtgctcttaaccctagagccatcgctccagctcctgagagttgaattctgtgttgctaagctctttctttggatcccctgatcgatcctgctctttcttgctctcacagaagggctgtaatcctcagggattgcaatggcttcaaggtcaacacccagtcagggccacataggaggccagaactcccttctgttggcctggatccccacttctccagccagcacagaggatggtaatgaagagacatctgagtcaggacaagcttccagaacactgggcttagaggaagtggggctgtgggggtggggtgggcggggagactgaggcaggaacactcagaagggcagaggctcaggcatggccagctctggctggtatggaagggcctaagccacacttgcctgccccatgccttgctaccctcagcctccctctttgtcctgccccccatccccttgttccatctttactggccccctagtgaggcccaggcagctgagcatccgctggtggagggaattaacatacttaattaaagtgtccacgaagagctttgcatacttcttaattactgtctgagtctgtggggggaaggtttggaatgggattttttttttcacctgtttccgaatttagctgacagtgagccagctgggccctgagggctcaggtgggagctgtcaacaccgctttgagctggggtggcagagcagggtgtggaggggaatcctggccccaggcacatttgcctttccgcagtcagagagggctggggtttctgtttctttaacccagaacaaaaggagacaagactcagacaatggtagctggtgtcttctcagctcctctcctcctcatagggcctgagtgcacaccacaccgccacgactgggccaatttcagggtgcctgttgtgcagaggtttcagggggtggtgggggcatcttttgggagtgctatgaaacagtgacacggggtcaggatggccctggcctgtcacttccggtttcaggcccaggctgtgagtgagctctgtccatcatcaggaggactaggctgaattttatctctgtccagtgctgcagagcagtcagggacagtaacgtgagcttgagttgatggcaggctgcaggcccaggctcttgtaggtggcacagctttgggcaggctttggcagattttccatcaaatgatttctgcaatggtttcttttgccctctcactccccggccctaacagcagtctctccacccacattcacactcacttggagaggagagtgagggggaggtgtgtccttcacaaagtgagacagcagcaggacgtgggtctggaactcaccatctattcagctctcatcctgtgagccaggcccaagccacacccagtgtcctcatgagtactgactcgggcatgccacccgtggcacagtgtgggtggatgacgtgaggtgaagggtaaccccatcacccagccctcagatcttcaccactccacaccaaaccaggtgtcagctcccctcagagaggatgtgtgctaggaccgcccagcccagtcacagtgcagcccctccctgaagcttggcaggtcaggtatttatggcggggtgtagctccacgtggccagggctgttgctggagagcagcctgcttcctcactaagaactgggctcacaggatgaacctgacatagttggcacccagtagggggtcagcgaatgctgaaacttcactgttttctgcatctacttggaaaccaccagagcgtgcacaagtcactctgtctggaacttgtgctgagatgggtcccagagcctgtgggaagccagtggagtgcatggaccccagggagacagacaggcaggtactgggagcgggccatcaaggctcagcgttcagtctatctagcagctggcagtagtgccgtggtgtgtggaagtgagcgcctcacagcctgtgggtatgcgtgagccttgtcccacagctcaggagagagttctgagaaaataaggttttgtgggaaatatgcataaatcctttgctcgtgagattgaatgattgctgtaatatttacttcctggacacagtgcttccttgtgtgtcctggtcgggtcgttattataccttcatggtgctcagaatctaagctcagtacctgatcgagccttgttggctgggattccagggatggtcacaaagccaggtgacctgagacatcctgtgctctcacttgactctgacctgccaggggtcctgtcacctcctatgttagatcacaccccactgcccctgcgtccttctgaatagtccatctctcaccagacttcagccccacctcctgggtggcttctgtagccagtctcctggagcagtgtaagagttccttttaaaagctcggaactggctgggcgtggtggcagcactcgggaggcagaggcaggcggatttctgagttcgaggccagcctagtctacaaagtgagttccaggacagccagggctacacagagaaaccctgtctctgtgtatctcatgctgtggatcagaccacccaaaactcagctgcccagagatagggagggtagtcacccgagtctctcgagttcataactggagcaggacacagcggggtaggtattagctctgaacatacagcattgtgagtgctagagtcctcggaatgagaaggcccacgcactcacaggtgacttgggatgggagatgtctcggtttctcgtcacaggagcaccagagtggtctcacccaggtgggctggcgtgagagcccagttcagggtgtatagacaggagcacactcctggcaggtgatctgccctttctccccagtgacacacagaaccatttgtgtccccagagtaggaccctccagacgcagcccctgacggatgccgggcttgcattgtgagggcatatggagtggggaccgtccctgtggtgggaatgttgaaccaccatccctgggtacatccacatcctgctgaagcctccttgggcgctcgcgatgccttggatgcttcagctatggctgccacacccggcagcgaagccttctcatctgccccttgtagctccacatccggtgccaaaggtgaggttttgtttaaatcgatcctgcagcttcatggagcttcctgtgtccctcatgggaacagtgtttttatttctttcttcacacactgtctgcctccattattctccccctctccctctctccccctctccctctctccccctctccccctctccctctctccctctctccccctctccctctctccctctctccccctctccctctctccctctctccctccgaatttgctagctcttccccgctgccttggggtcttggtcccaccagcagctttgctgacagaccccaggatctgctacttgccaagacctctctccaggaaggaggcagagtggtactcactccttcactgcctgttcacttggagaccttgggcatggttttttcttttcattaattaattaattaattcacttttcatcctgatccccgctcctctccctcctctcctcccagtcccaccctcagaagcccccccaccccacccccgtggttactaacccacacatcagacacatcagtcgcagcaggactaagcgcatcgtctcccactgaggctcagctattaaaaacaaagatatggggctggcaagatggctcagtggttaaaagcactgactgctcttccagaggttctgtgttcaattcccagcaaccaaccacatggtggctcacaaccatctgtaatgggatccgatgccctcttccggagtgtctgaagacagctccactgtactcatatgcattaaataaataaataaatctttaaaagaaataaaagaaagatatggtgcatccatatgaaggcaaataaatggagctagaaaataccatcctgagtgaggttaccccagacccagaaagacactcatggtctgtactcataagtagatattagccataaagtacagagtaaccatactgtaatccacagaccttaagctaagtaacacggagggctcaagggaggatgtttgaatctcactcagagggggaaataggcatcggagatgactagagggagggaacctgacctcggctatcttaatgcatagcatggagatggggattcaggggtgggtggcctgcttgtttccagtaaagcccagccctgctgtgctgcactgtgtcctgagccttgccgccagcagtgccagtgcagtagagtgaccttgaaggcagagcccggtggaaggctggctctctgaagggttcctgcaggaattcaaagctgaggttcaccagcatttcttgcccctcctctcattgccaattctggtgtgtgctgaccaccgccatccctctcagcacactgccccccaccctcgccatgacctctagtaaggcctaatgaggtctgtttccagattccagcaacttctacccagggccgttgtcgaggacaagaaagggacagggcaggaccttctgtcctccggggtggggtgaggtaggccgagaactccccaagcatgccccacaggcatgctgtcctgtaatgctgtggtggaggccaacgcgagtgaacagagggactgccttatactctgctcaggcctctggaggttccaggagacagaatggagggggccttttcctgcagttcctggtgtctgctagtgttttcagactttgtgtccagagccaggcagtccagtcccttgcagactgttgagcccagagacctcagaagccaggatcagggcagagaccctgcggttccaaacttggccagcatggggctgcggaaacaaattgatcagaaataaagagcagggataaatgctctgggaagcatgaggaccacgggaaggatgaggcgtgcaggggtgtctccaagaaaagaagctggaaaatgttgaggggctccccaacacatccatacttctgaccaactatttctaaatccagggggtccccagtgctccttaggttcaagaacggaaactcaggaagccagtggcgggggtgaggggcaatggagagatggctcagctggtcacttgccgtgcagtcatgaagacccgagtttggctcaccagcatccacgttagaagctgggtgtggtgatgctgcacatctgcaaccacagccgtggaggggggagggtgggagagacaggcagatccctggagctagccagcctcaccattcagtgagttcccacgcagtatggctgtgccctctcctcacagaatcacagctctcccccttcaaggcatatctcacaacccaggaggctatgcagggcctggctgtctggaattctttgggatttcaaaaacaggcagagctggttgagtgttgtccatgtgatggaactcagtccccagcctgccttccttccctgggggttggactgactctgggccccagccctctggtcttaggattgacagccccatcctgaagccacctagggaaccaccacctcattaatataggctcaggtagagtgactagggcttaggacaaacagagatattcctgttgtgcccccccaccccccacctccgccctcaattccaatcgcagcattttccgtcctcaccccaagccgaggaagagtcagtttcttcattacacaaccttagtggtggtggttttgtttttctcctgtcatttgtcattctggaaattacctctgctatcttaagtgacctgacacctcttgctctttagcatttcctgtgtattgttcctcttatgaccttctcactaattaacattctctgatgtctttgttgtgttataacgagggaggtccagaggagtggtgaccacctcaaggtggtcatgaccacctcaaggtgacacagctagtaagcgccccagtaggattttcacctcagctgggctggccatgaggtcttctggctgcagctcaaacctagtctatcggacaggtgactgcctctccttggccactgttggctgtcaggaatgactacacttgtctgttacgtgctgtgcacaatagattcaaacccagcagagagcttttctatggatcccattggattgaccggcatgccactagtcccagcctggggatggcctgctagacagtggacagggcagaaaggccttagggacctttgccttccctgtcacgggtacttatctcctgcactcgcttctgaacctctctggactgtggctgagtcctggtggggcagaggagagaagagctccgagtagtgacctaacaaatgtccctttatattatccttcctcccctcccagatggcctgaagtacagcagttggcattcttgtcactgctgtgtcccaggggacctgcacggggttgtgtcaaaagccaagccctgcagtttgggaaattagcagcatttatggctgtcccaagagactcttggcatctcagccaaactagcaagtcttcagctggggacatttctgccccagtaagggagtttacggactgcagttgtcacagtatttgggggggtcctgttgtcaattacgtagtgggatctcgaggtgctaatgacccagcattgagctggacagtcagacacactctgtggggaataggcttgcccttgagagacctgagaaaggtctgcttccctgcccctttctcaccagggtttaagttgaataaatgggaatcaaagaaagtctcccttgagccgatgagtggtcaggtggtctatccaggggggcacaggcagccatgagaagagcattctgttgggatctcatgtcagctggggcctggggtcagggcagacctggacttgggtggtagagggtgaagaaagggtaggccgccacctcctccgtggcagcctggggactgacgagtgtggccccctagagctcacatcagcaccttggcttgggctctttctcctggggtctgcttctctgctttctgtggtttctatgagccagcctttcaagtgcgcgtgtttagaagaccctagccataggctggtcttacggctgaacctctctctcctttctgccttgcagtcgggaagacgtctctgatcacgaggttcatgtatgacagcttcgacaacacctaccaggtaagactccccacttcccatgctccccccccccacctcccctgcctctgtctctgcctgtggaccctgtctggagagcactgccagctgtctccagggagcattgagctcagagtgggtggggccactgcagctctctcaggcaacttaccgattggaaggaatgccatgcccttcctggtaacctggcctaggccggaaatgagctcagagtctagatgttgaaaaggaaacttttattttttaagggagaaatatcaaaaccagagaagggatcttttgaagaggcaggttggaagcattacagagtttggttatgtcaaggggcaggccgaagaggataagatgaagtgcaggggcagttggagagggtgcagctcaggagtggtcacactggctggacttgacatacacataacccagacagaccacgcacggactgtcacacacgctcagtccgccctcatcccctgctgctgaagcacacgctgccacagagaggcgtggacgcttagttgaccctgccctgtgtggtcaggagactgggcataaagacatctgtggagcctggtttgggaatggtagcctgggctcagtcacaggcccataggtgaccccaaaccgaattcatgaggggcagagacatatctgtttggtatcagtggtggtggtggacagggcaggcagtacacgtgagtttcctcacagctaaagcattttgccaaagttgttatccctaccaccaccttggactgtctgtccacagttagttcaccagttcatttctctaggctagggtcctgtgagatactagctcccagacaatgttagtagctgttacttggcaaagggagtgtgtggtttcacaagcagagctgggttgtttagactgggggggggtggtggggggaatgagggtgggagtggaaggggactgctctcgctcagcactgaatctcagggctccccctcagcccagggcttcagtctgctgaaagcagatgcagtggttgtttgaatgtagaatccctttgtcaacacattctcaaggacaagtatttatagattcactggggcagctgttccaaggtgccgctctccccgctgctgggtgtggagcagcccacgagtctccgatgcttgtccgtccgtcagtgccctagtgcagtcacccttgtctcagatgtcctctgaggaccccctttctgtttccctcaagttcttattccactctgcaatgggtggactgaaatcctatatcacgtggactccagagggattgcctacggggaaggacaggagactctgggtgcgtcagagggtgtacgtggctttgggacattgatgccggtcatactgttgtgtcctcccccaagccaggactttgcgtcactttggtctgactgtggagcagaggtgacatccctaacagactcccctcctgaaagaaagatgaaatttcaagacctgtaagtcatataaagtactcagaaattgctggttgtttgtgagcctagaggctgcctggggctgaaaataaagaaaaacaaacctgggtatgccacatagttaaaacattcctgggaacagcttaacctataagataaagaagactgtgaggacaagcagggctatcttgtctgggtcaacaccacctggccggaacctcccctctgtctactgctccttgacgccgggtaaagtcatacatcaactggttgctatgtgaacaaagataagcccccagcccacagaaacaaagtcctgatgcccttttgctgacatgtaatctttctgttaatgtttaaataagccaatagtgtgtctctatgctgaattccacacccctaagccccttaccccataaaaacccctagcttctgagcctcgtggccgacatccgttatctcctgtgtgggatgcatgtcggtccggagctccataattaaacgtcctcatgtatttacatcaagatggttgtctgttcgtgattcttgggtgcacgccgaatcgggagttgagtgggggtttccccactaggttctaacactcctaaagtctccttgtgctctgtgtgtgcacatgcacacgtgtgaatgtgtgcacctgcgcacatgcttgtgtttttattagttgacttttccctttttgacacagagactcctgtggctccagctggccttgactcttctgggtagctaagaatgacagtgatctctggctatttctgactactgcttgatttttttttagcgatcttcctgtttttcctatggcaccgcattgagattcttagcagcagtggacaaattacctttgaaattttatctcccttcttcccactgtcaccctcattgcctgacgcttgtcactcaaatcaggctttacttgttcctgtcactgtgtggtggctggcgatggcctagcctggacatcagctcctgtcactgtcccagctccgctcgctctgctctgaaaattcttccaatgcctgaagcgtggcaaatgtttgccctgagaacagagccccacctcttgcatcagttcccatgagcctttggctgtagcgtgtgatcctgaaagctagttgggcccctcaagtctagggctactcctctgcccttctggttctcacctgtgttttgggatgtgccaagtccaggatcttcttggagacatcactgtacaaggcctggctgaagatggtgccacaggtacctacgggcacagtaatggctgcttgcctcagttgactggtgccatcagactgagcgcctcccaggaccactgtcatggtgagtcaacggagatcacagaacagatccgatgccgctctccccatgcgtgggagaattgtctgactcggtttctttacatcaccaggtggaaatcctttccttaagccctttagagcagtaattaggctgagaggctgggctctgcttctctccgtcattcatacacacacacacacacacacacacacacacaaagacatacacacacacatatacacatacaaagacatatatataaacacacaaagacatatacacacagacacacaaagacatacacacacatatacacacagacacatatatacactcacatatacacacaaagacataaatacacagatacacaaagacatacacacacatacatatacacacataggtacacacaaagacatacacagacacacagacacacacaaactcacacacaaagacatacacacagatacatacacagacacacacatacaaacaaagacatatgcataaacacaaagatacacacacacagacatatatacacaaagacacacagatacacaaacacacacacacacacacacacacacacagacatacacacacacagacacatgattgcttgttaatcctctggagatggaggaggacagactttgtttattttctttttctgagcatagcagcagaggtgtatgggaaatagataagtccccagggacccgagaagatgaaatgtattttctctcaggctgtcccactgcacaggagccgtgcttgtcaccctcccaccaatatcctgtctgtcccagcagcagtacagcatggcagagtctaggcccactcagtcagctcccaggacagtgttccctctctctcctcatggctccagaccctgtgctcccctcccattcactcatcctgacaaaagacagctgtgtgctgtagtacatggcctgacagaaggtagcagaaggcagcctggcccaccctcagcggggcacagagggcagggcctatcctcagccacggccagtgccaccttgatgtagagctgagtgtgcaagaggccccaaagggccaccatgcggccctgagtatggtaggctggggtcctcagctgaacctctcagaaggttctgtttgtggccctggtgagctggcacttctacagccctgggggacctttgagaagcatgtcttcgttctctacttacctggcagttacacacatacacacacacacacacacacacacacacaccccttattctccgctaacacatgtactctagtctctcaccgccctgcctaatcacaccatacaaactgattcacttatacagttttcacttggtggaaaaccaagtctcaagcagaggaaattttgtctgtggtgattccttcatgtaaaaccccagctaagaggtagtatgttttgtaatgtggtagcatgatgcggcggaagtgggtgccttagcgggcccatgttgaggtacccccaccaaggtaccagccagacaatgggtctagtataaaatgaagtttatttggggcatgagaggaggctgtggagagggggtggaggcagagaaagaggacagagaagaacagaaagagaggagagaaagaagggaagaggccagcagagaacatgcagggagagagaaaggaggagaggacagaagcgggaagagaggtcacacagtctttttatagccagctgggctcatacctggctgttcctaggtaactgttgggcagagcctagaagaaatgctaacgaggttttcttaaaactctatctagggaaaaaaaaaatctgggcatatcttgtaataagaggtggttcttgctgtgcgctcccccacccataccagcacatacccaggaaacccctgtgggccctgggagggtcagctgtgtgaaggagccctgctaaagggaggtgtggtcctctgaaggtcactcctggccgaggctctccagggtgctctttccagcctgcaaagctggcagctcaggccttagcgtcttagagaactgagaggtggtaagaacttaacactgaggacccatggcccctcctgtcatccacaccaagttagaacagcacagatctaatgggctgcctcagggagagaggcgcccacaggccaggagggctcttctcagaggacacttgtgagatgggaaggtgtttcagactctgaagggggttcctaagaagcaaatgctggtctttctggcaggctcagatctcctgagatctcttgccggcagctgatcctcgagccatggcagtctgttctgccctgaggcttcccacactcagtcttggggccgccgccacagcaaattaccacacactgagtagcttcaaaggaacaggagtgtattctgtcctcaccttcctgggggcctgagggtggaacacatacaagagagccctgagcttttgggggttggggggagggcattctccttgctgttggcttctagtggcctcagatgctctttgtcatagggcttcaagatttccatctggccgccctcttcatgagatctgagtagataaggtggatggataggtgtggattctcatctgggcccttgaagtggacgcagcatgcatctgtatgcatctgtatgcatctgtatgcatctgtatgcatctgcactcggggagaggctcctagtcacgtcacctcacgtggtgcctgaagccttggatttttatttctgtctcctgccttgtcctgattacgtgctcttgccgtggccacagagacttctccctgacacagtgcggtaactggcctcttacctgacaagcgatgcttcctcttcaaggtgaatacatatatgcttgtacacacatacactcacatgcagatacatacatgtgcacacacatacactctcacacgtgcctgtgcacacacacgcacacatacatatgcatacacatggcacacaccagcacacacacatttatgcagtgcgcacacacacacacacacacatatacgccagcctttcctgaatactgaataaagcttctgcgtgcactcgtgcctctctccgctgtggctgcatcaaatcctcctcctctcctatcggctccactcttgtcttccggtggccttcctgcccactccagcagccatcagtcgctggcttgtctggcccacacaccctagggaccacgtcactaacactgtttttcacaggctcagacactactggaggggagggtgaatgggcaaagacttggttgaccacagtgatacttctcatgatgtgagcaccatgaccacccagggaccaggtagcaaggtgttttctgtattagtattatgatgaacagagccaattacatgtatgcacgtatgtatatgaatatatgttattgtacacgtacacacacgattacaaattggacagccattcttcatagagaagaaagtaaccacgggacagattgtgaccttgaaaagccaggtgcctgccctgtgaccttgggagccagcatctcctcctccagggcactaactgagcagctgtcattggctggcagtgacccggccctacctgttcccaagaggctgtgagctcctctctacaaagcaaccactttcttggctgagtctttaagtttaccaggctcatttgcatgctaatttgcataactttacccagatacttcggtctggtggttggctgtgcctgagagaacagcagagtcattgtcaggggcttgtcatgcccagctgctttctgccatttacggatgcttctctccagcgccggccggccgggctcaaaaagaagacgcacgcacatacttgccttttcattctcttcccctgaagaaataaatgctggcgtcaatttatgctaattgccatgcagatttcctccggtagactttattgctgtatcttgtcagaatgtggatgcaaatttatatttcataataaatgcacagagctaagaagatttcaacaagtgccgtagggaatatcttgctcagagatcttcttgctcggatgtgctggtggaaggtctgtgcagaggaatgcaagtacgccaccgtcgacacccctgtcgatactgtgtaatgccacactcaaaggaagataaccgttgggaggaaatctgtgcttcttaatattctttgcatgtgtaaaataaagtggctgctatttttcatagtcagtgagtgccgtttgccagcgcaaaagaataaattagcattgccaggttcggggccacgtataacagtagactacacctccgtttccttcagagaagacatcacgcaatacaggcagagaaggcacagctgtgtgaggggatcacggggcttctagactgacagaggactcccaggcacatgcctgtttgtatctcttgatatctcatcccctgtgggcatctaccatcggaaatgatttgtttcatacctcataagataaagaatagaaaagctaccttgactataactccttggcacagtgaaagagcggcgtgcctctcctcggctccaccttcctgaacctttgctgaagccctgggaatcccagatccttgggatgtcgatgaagaataggacagcaaaggttcctgaggggctgggggtgggggtgggggtctgacagattaggaaagaaacagttcctgtctctccactgcaggattcaacagagcctttaatgtgccaggagagtcactcacttgcttgctgtttctgctcatcctgagcagagactccgaggccataccgcataaccagacagacaccgggcagtctccatggcttggctgtgccgctttgcctggagagccctgggtcagctggttcctggtaacaattgctcatttctgttgacatagcatatgacagaatgaagtgccttcacagagtcttaactcctttggtccaacagtccttagagggagctctgggatcttcatttgagaggtgagggggttgggggctagggctaggctgggggctaattggactccttagttcagtatgcacgagagcttgggtcttcagttatggggcacctgtaaatcccagcacagggaggtagaagtgtgaggataagaagctcaaagccacccccagcaacaagctaaaggccaacttgggagctggggtacagtagatcctttcacaaggcagaaaaacaagataaataaataagcgcaaagagcaacaaagaaaatcccactggcgcccactggacacatgacccactactgatggcatgttggcctctctggggccagctgtagcctgtcctgagtggccctgatatacacagcctgagtgcgctccctttccaaagaacccgtgagggttcctcatcacctgggccgcagggcagcgctggggctgtgtgtatcagaaatcctggcattaatcctggaataacacacacacacacacacacacacacacacacacacacacacactctcatactcataccagtctcacgcacccattcatgcctttgtacaaatacagtgtaaacttgagtgtgttccattcccacgcacatataaacacacatccaccaatgcataactctcctgtgtgacctgtgttgacccctgagaggaggctggtccagaggagtcaccaaggatccctgggcctagccgaatagttagttgttcttgctatctggtgtctccttcctccaatgttcacctgaagtgggagtgtccttcatgaccaagactgcaggtgcaaaggaaaaaaaaaaactagctctgcaagcgagggcactgggctaagtgtggcagaaataccgcctggggctcaacatttgatcccaggtttcctggtggacaggagaaactatatgcttgggtcttgtaaatataaatacaagaagtgttcaggtttgtgttctgatcagatgttgctaccctgtaaactaacccacatcacccacaggctggtgtgtttggatgctgggtcaccagctggtagggatgtttggggaagttgtgagattatatttagacgacgagatgtagtggaggaagtgtgtctggggaaggcagagctgcagtggattccgtttatggcctgcctccagtcctgatcctctgtggtggaaacagcctcacgctcccacccgccatgggcaggagctgctctcacctcccctaaagccatcaaaatagagccttcctcctgtcagttctttctgtcaggtattctgtctcagcaacagaatagtccccagtgtctagggtttcctggggccagcctacagagatgtacacacatgaagtggcttggcaggtagactggctggtagtagtgtgaacggcgaggtggactcctcacgtgggcagtctgtgcttctgactcaccggcctctaaaatgtgctgcccgcctacccgcctcacttcctgctggcaccatattgtactgtgtagacaaacacctgagacccgtggcctccacagtcagagctgacacaggtcagagcctgtagggtggtactgaataacaattcaacagtgctctcagacagagcccaggagctccacacactgtgctccggccatcccacctcctgccttgtgggaatgcccatcagtctggatctagcgttgtggctctccacttgggcagtatgagtgatggtctggtactgcctgctttcactagttggtgtggtgtggttgcggctaactttctgtagtctgctccaaaagagtcagcctatattagctacttttccacgagtatcaccaagcacccaacagaaacagcctaatgtagaaaaggttgatttgggcgtgtgatttcagagatgtcagtcagtcatggtagagaacagagcaaagcagtttgcatcatggtgaccaaaaagcagagagtcggagcatgcaagcaagggtctggataaggacacactagtgacttacttcctccaactagcccccatctcgtatgccttactatgtcccaataatgccattgtcttaatgaacccatcaaaggattgcgccattgatcagaccagagctctcatgatttaattgtctctggaaatgccattacacacaagggcgggtagacagatagacagacagacagatggagaagtacattatttatctcctaggtgtttctcagtttgtttgtttgtttgtttatcatccaaaggcttatgttttgaatgcttattccccagcccgtggcactattttaagagactgtgtgatttttaagaggtgggactctatctggtagaagtaagacactgggggtgggagggtggacccttgaagattatgcccaaccccttcttcctatgttgctctccttttcccggcctgctgtgatgtgaacagctttggccacattctgctactgccagatagccttcccaagcaggtgggaccaaacatccatggactgaactctttgaactgtaagccagaagaaagtcatcccatccttgagttcttatttccattgagtattttggctgcagtgattcaagagtctatactaatctacttaataaacttaaccaccatacctgggcagtggtggtgcacgcctttaatcccagcacttgggagacagaggcaggcagatttctatgttcgaggccacagagtgagttccaggacagccaaggctatacagagaaaccctgtctcaaaatgaaaaccaacccccccccaaaaaaaaaaaaaacaaaaaaaagccaaacttagccatcactcagcgcacaaaggccatctttatgtcctcatctgaagccatgtcctagtagcagagaaggtgtggggtggtccttgtcaccctgctgactcactatcacaccctgggaaagtcatgtctctagtctgaacctctagtttgtcatctgctgagtgaatatatgttcacccatataccggctactccacttgttaaaacctgcctcagccacgcacacagcctttctacatctgtccacattcgctaagtctgacctgtcctgagtatcatccacataccctgccccggagcctgctccttccccttgcatatcttccagatatacacaacagttctgtgtatctttcttacatctgtcccatctaccagccaggatgatctttctagagtgccggctattaggaagtccttctgaagtttcacttcatccagttccctggcttcctcaagtcccctacagcagccattggccccaactgttttccattttctgaaagaactacctggcttcattcttcagggtgctctctcctacaacactctctttactgcctttacctgtgtactgaccctctcctgtgcccgtagtccttgcagaagacccaggtcctgtcaccaccatttcctttcaggctaaggatcgtctttaacatagactctttgtccccgttcatttaaaaggtgcttttagtttatctgcacatgaacattttttgctgggttttaaattctagctccacttgctatctgtcatcattatcttccctgctcttccatcctcgggtaccaggtgccattttcctctggctggtctcaagattgtatctttggtttggtcctcattgatttgactctgatttttaaaagcttttctgggctggagagatggctcagtggttaagagcactgactgctctcccaaaggtcctgagttcaaatcccagcaaccacatggtggctcacaaccatccataatgagatccaactccctcttctggagtgtctgaagacagctatagtgtacttacatataataaataaataaaatatttttttaaaaaaagcttttctgtacttcttgtcaattgtggtggcttcatgttctgtccttcacgttgtgttctagttggtatgatattatatacttgtgtatgcctatgtgtgtactgtacatgttcttgtgtgtgtgaatgtgtgtgtgtgtgtatgtgtgtgaagaggtacatttctcatggcacgtgtgtggacatgagaagacaacttgtggaattagttttcccatttctaccatgagggttcctgggccaaactgaggtggtcaggcttggcagcaagcacctttacctgctaagccgtcttgctgaacttgcccatctctgtctttgttatgaacataaccttctgtagttgggcataataaatattggttatcttaaaatatttcttcctactttcaatgtccgaatcatctcaggattgatcctcattttccttgtgtatggcttgcgttttcctgtcacctcatgtgtctactcggttgagattacatcctgcgcgcgcgcgcgtgtgtgtgtgtgtgtgtgtgtgtgtgtgtgtgtgtgtgtgtgtgtgtctgtctggattctggttgcagctttgagtcctgctggttctttgttttaaaccctgattctcagctctgtcccctgtgctgggcaacaaccctctcttccatctgtagtcttgttttgcttctggccttgggcagattgcttgggatcttctctggccatccagtattggacagcatttctatagagacttcagagccccttctgtggctttctcatgtctaggatttttctgtacttctcgtcaattgtggtggcttcacgttctgtcctctcgtgttccagttggtatgactgactgggtttcttcatgagtctgagtttttaccagcacttcctggtgccttcctcgcctgttttttctagttgattcagagttaatagcatcaatcatccagagggctagatgacctcggatgatgagaaccagagtccacctcactcctccaagatgcttctcctatccccactattccccgacttctgcctactggaaggtcctatgtactgaggtcttgcgtatccactccacatatccatcagacaccgagcaagccaggcctgctgctctgaccttcatcccttccacgctggctcttcctctccatttgctgtgagtgacagtttctgtatgtgtcttctcctccaagtaggaagatccttaggggcagggactggggatttttttttttacaacacacagtaggtactcaagggtgaagtgaagtggtttgacttaattatttacaccatctgccacgaagaagctgcccagggaagaccatgactgccaccttctctgaaaatctggcctccgtgggagacacaggctccagctggcagcggtgtgggccagctgctgagactcatgtctgggaaatacatggtgcccaggagctagagctatgttctggtcatggagacccagccaagtctctctttcaagcccttttccctatgtcctttgagggctcactttatttatttctactaaaatgcaaatgaactctctcttaagagggctctgcagagctgttatggccaatgattaccgctttctgacagtcgggagccagacaggatttgactccagggaaacacagtgacagcttggaaaatggacttctagaagccgcaggactacagctcaacagcccaaagcagagcctttgacgtccgggagagctggattcagatctcaggtctgctacccagcctgggtgacagaccttggttcggagtgagcctggttccttccctgtgcatagcaactcatccactggtgttatctccatctcccccaccctcttgttatcagtctgtggccctggagagcacagcctcctcagagctggatcacagcacagagcagtttatctgcacgcttcgctgagcaagtcactgctctgagaacttgtctgtgattctgacacgcagagcctgtgcttgtgtctacctgagtgggcccaggagtcgcagtgtttaaggaagctcctggggtgacactgaagcacatgatccacatggtacatgctaaaaccccccacatggttgaccagaggcagagattagggagtctgagacatttcctatttggtagagaaggtattgaatagcctctgggctatcccaagtgttgataatctgatttgcggagaagcatctcaaattcataagtactgattatggaagaacatttcacaggagggacagcatcaggaaagagatgcagaagctgacatgggaagggcctgtagactgactcagtgggtaaaggtgcttgctgccaagcccggtgacctgaatttggtctccagatacatgtggtggaggaccagctccagcaaactgtcccctgacttccacacaaaagccatgcatgcatgcatgcacacacacatacaaagtgaacaaaaacatgcagagaaacatgtgtcttagttagggctttattgctgtgaacagacaccatgatcaaggacaacatttcattggggctggctcacaggttcagaggttcagtccattatcatcaaggcaggagcatggcagcatcgtggtgcaggaggagctgagagttcatcttcatctgaaggctgctagaagactgacttccagacagctaggacaatggtattaaagaccacgcccacagtgacatactttttccaacaaggccacacctcctaatagtgccactctctggcccaagcctgtacatgacatgtgaattctaaacagcattattccttggtataaagtcaagctggttatgaggagtacaaggttataaaaagccagtggtgactcttgaacagtcaaccacaggtgcttagactgtttcctgggagctgtaaggaggaacaaagtcaggatgtgtgtgtgtgtgtgtgtgtgtgtgtgtgtgtgtgtgtgtaatatttatattgtatataaatatataatacatattatatatattattagttttgtttcttaagattcatttatctttatttcatggttgagtggtttgcccccatgtaagaaaatgcaccatatatgtgaagtgctggtggagaccagaagaggccattagattccccagaactgctgcagaccctctgggccctttgtctgcgtggaacgggtctctctagtcgcgggtaggcaaagcatcgaatgaattgacagacagatgcacacaggagaggttgtgtagaatctgaatgtaatgtcaaatccagcatcagactttttatacagaagacaataaggaagttgggtgacattcctgcacggtaaaaagaggttactggattcttacataaaacagaggaatgcaaacacagaaggtctaacaggaaccacctgggatagaattcattgttaacaactgggatcaacaagggctccacctaagattcacttaatcttagaagcccagggtcaagggcttcgtgcccttgccatagttcctattttagtctattgtatagtccaccttccccttaggccattgtaaatacgtgtgtgtgtgtgtgtgtgtgtgtgtgtgtgtgtgtgtgtgtgtgtgtgtgtgtgtgtgtgtgtgtgtgtgtgtgtgtgtgtatgggtgtaactcagctatagtcttagaagccaggtgtgaggtctttactcttctagggcaagggctttcacacccaagtcatggttctaactagggagttcctttctagctaaccatctcatgaataatgcaatactctaaaaccatagcccgatctacttcctaaaccattgtaaattcctgtatatgggtgcgacttggcttttattctaagtgatagtgtaataccagaggctatttctggatgtcactgaatagcaatattcttactgaacttctagcccatggtcttgctcaaggacgttctaagactgttggaacactggcggaaggctttagctatgtcagaattcaatcttaaaaagcacttataataggataatactaaaagagagcacgtggatccgtacactagactaactcgggaatggaaaattaatgtatgggttagagagaacgccagactccaggagtgtttccgtgaaactcttccgcctcatgagtagcttccaaacctctcggcttgtcaaactgactcaaccggagtgcgtggcatagaacaagctctatggagagttgtaagctgccctgtgggtgctaggaacttaacctgggtccttcccaagagcagccagtgtaattaactgcagagccacctctccatatccctaatgtcattggttttaaactcaaaactaaccttgcctgccacatgaaggttgcttatggggcagtggtgaggacagggaacccagggaagatgctactgaggttactcccgtgggaggttcagtctgcacgagggagcagtgagatcggtgagaaggggtgaggatgggagcaggtgaaaccacaagaggtggcaccgtcatctctgccttccctcacccctgtcttgatggtttcagaatgtcctcagagttcttgagactcattcccacatctattttcttcttttaaagcctagctatttgtgtcatctaggggtctgttcctcttgaggtttttttttttttcctcaattatgattcaaatttcttctttgcataggtggtctgtttttattttgtggacaggataatttaaatgcatagctttctttgcttccccagagactttaatcccttcattgttcaccagcttgtggtctctcttacgtgcttgtacattgttgtttcttgaattttttttctaaaaatcagaatagcctgatccaatctgctcagctctcaacaaaagaaaaacagtgacatcagagcttaagagcaaagatggctcagacacccagaggtgatgcccatgctgtgctgtacagatgtaagaagatacacattagttgaatgaattacattttttatgttgttgtgattaagttacctgacagaaacagtttatggaaagaaagagttttggtttttttttgggggggggggttgttttttttgtttttgttttgttttgttttttgtttttttttttggctcatggtttcagaagagttcagtcctcatggcagggaagacacagcagggttcacagcagtgccagcttgtggtgggagctcctcagaccacagtagaccctgaagcagagagagcaagaaccagctataacctggggtccgtgtcagacacccaccctaaatgtcctgtctccaccagctaggtcctgcttcccaaaggttccaaactctctccaaagaacaccaccagctgcagaacaaacactcaaaacctaaacctgtgagagacttccagtcaagccataacattccatcttggttgccaaaggctcacggccatcttaaaagacaaagacacacttattccaattttaagacgttctcacagtctcaacattgaccaatagtctaagtccaaagtctccactgatggtcaaaacagtctgtggtctcctggaaataagaatgtgttcaagattagaaaaaaaataggagaccaaaagccaacaggggaaacacttaagtcttctacctccgtgtccagaatctgggcacatcatttggtctcacacagagatgttccttaaaaatctaggtgctagtctctgtgaccccataatttacattctgcacacctgaaaactagcaccagataggtaagtcaaaagtcagctgccgcagggaccccttcgattatggctgcttttggcttctgagtacctgagaagctgaaccaaaacctagaaaaccatcttcttaggtggccccttcccatcggagcaccttggtgactcttcaaaatacattcaccttctgaaggaaagtattttaagtgattaattgattcgtcttctatttcataccctggagccctcagaatggggacagattctcagctcacctgctctgttgcccccgtgccaggtgagcatcagtagcatgccgtgacccctagtctcttatccacagctttaaacatcttctcctttctttcagggccaaattacacatcttgaaacttctctgcattttgcccccagtctcactgtgaaggtagctaaaagtaaccagccagaaccatactggtagcaggttgacctctgtctgggttgctttgcattttctccattacctttgaagtagtccaccacctcactcaaaatttcaggtcatgggtagaatgtaaataaattctttgtcagattccagtggcctctagaagccagtgaccagtggagtccttgttttgcccagagatcacgtgggtatggtctttgctgctcatattgttgttagtgtttgatcctccaagttctcaagggaacagtggatctggggccttagagtccacatggttaaactgttgcaagccagtttcaaaggcttagaaaccacctggtaagattagccatctgaatgttgccactttgctgggatccgctctctgcttctcactttagcatggttctgagagaaacaacttgaagaaaacactctttctggctcgtggtttttcaaagggcttcagtctatccagcagtagcagcatgaagtagaggcacctcacgccactgaggcagatcaggaaagagcgaggacagaggctttgtgtaaccttcaaagcctgcccccacccaactgcttctacaaggtatgtcccattctgaaaggttccaccgctctccaagttaacactgtcagctggagaacaagcattcaaaacacgaacctatgggatgtttcagattggaacggccagaatgagtctgagagagtgacagctatgcgattagggatggctcttaggtagtagcttgaagatcagatagaggtgggaggcagctgtggggagaggaagttggtccctctcggcgttggctcattgctgtctccttggtcagtctgtttcgtgaggcttaatagagatatagtctgtggctcagtgagctttaacgatgataaaagtcactgggctacgtgttgctgcggcttgatccagtggcatgactcctcgtcatattatctaatgatctctctctgcgccatggcagcgaagtgtcttacatgtgcacacaatgggggaaaaggattgtcgccgttacagtaacatccctgtcgccacccagctgccgaccttaggggataggattttccatggtccttcactctgttgatccaggttagttacgccgtactgacggcggcttgaacaaagtagaaaatgagatctctgttacttgtagtactgccgaggtgactctcttcacagtccaggagtcaggctccgttgaagtcttcctgccctctggtcctcagctggacgagccacgatcacccgccccacgagtctgcattccacgcagtgggaaagggggcagcttagtggggcgcactaacccaggaagggctcattccggatgatcatcacctacacatcctgcgatcagaactcagccaccctgcagccaaggcttctgggaaacatggcctttgactggggcagctcagttgtgcattttctaaattctgtattgagggatgctggcagcctctgcctctgatcctgagcccaggcatctggtcttgcttcaggggtcactaaagaaggagtctggtgtcttcaaggatcctgtggcacatagaaaagttgacatttctgcctgcttggcatattcctggtcttcgagcgcgcatcagttttagacttagttctcatggctgtggtaggcacttggggaagtcaggcaggaagctggaagcaggagttgaagcagaggccatggaggaacactgcttacaggcttgctcctcaaggcttgctcagcctgcttgcttgtagcatctagaaccacatgctcagggccttcctgcatcagccatgtatcaggaaaatgcctcccacagacgtgtccacaggctagtctagtcaggtggagccagctgagagcccctctttctgcaaacctttctgtattacaagaagatgattctaggcacagggtggagcacgcgactggagccatgccctggatgtctagctgtgtctgagggttcgttatcacttagtggtgtttgctctgtttcacaccgacagtatcttggctcctgcttgtagacatggggtgcaggtaaggaccagagaggttgtctactaggacagaagaggtgccaggtggcacaggagtgtgggtgacatcccttggcttggcagcatgaggagcaaaagagctctttgggcttcaggcattgtggatggtccacagtaccccatccaaggcagggcacgatgctctctgtccccatgcagtgacaaatcctacccaaccctgcctccccgagaacaatgccgaactgaagtccaagtccaagggagagtctaggagctcaggggatgctggaggcaggtggggactgcttcctgtgccccatgctctctcacccttctagaggcaccgttctctctctctgcgtagaacatgctctgcaaacaaaaacctgatctcaccatcatttgctcaatctccttcctcagtggagggacttggcttgagtgtcccctctgttgtctgtgccatttcctggggtccctggccttctggctcctttgtgtgattcctttttcatgttgaccttttggtgttggtttcttttttttaaacaggcaaccatcgggattgacttcttgtcaaaaaccatgtacttggaagaccgtacggtgagttcctggtcttagaactggaggacaaggagggcattgtcgggcttgttccctagagccctcacttgagcactcttgggagtctctgccaagaccaggagggagctagcagtgccatcatcgtggggtctgggcttccaaccccctctaccactcctctaccgatgcctctgtttgggccttgtaggttcgactgcagctctgggacactgctgggcaagagaggttccgcagcctgatccccagctacatccgagactccacggtggctgtggtggtatatgacattactagtaagttggagtctgtgttggaaggagggggctcttaggacccagtgtgaccctgaccagacctgtgtgtgtgtgaatgtgtacgccagcgtgtgttcagtgtggggtagtgtgttatcttaaactgtagtggattcatcagtgtccttcaaactcctgtgacagattcgactgcataatacagggttgatcctgcttggggcacgggccccccggggtgggggaaatggcaggtgttcacagggttagctctctgtgtcctccctggccctggctggcatgtgtgtgccagctttccccaggcatctctcgaggcagtccctcttgtatacacggtttttgaaagggctgcacagactcagtgggggaccagacattggggcaggccttatgcagagcccaggtacccccaaatcatccagagcaaagattctcaacctgtgggctgacactcttctaggatcaaatgactctttcacggggatggcataccagatattctccgtatcagatacttacattgcagttcataacagtagcagagttacagtttatgaatttgttactgtagcaacaaaaatagatttatggttggggctcaccacaacatgggcaactgtgttaaagagtcattgcattgggaaagatgaggaccactgagctagagatgagcaactgtgttaaagagtcatagcactgggaagattgagaaccactgacctagaggaacacacctgggaagccccaggctttactcccagagtgctctgaggaccctgacatcacatgcggttgtgcacgcctcactgcccagttctgccttgcccctctgtctacctcctcctctctgagcatatgctccttacaccccctagtgaggtgggagttgtgtcacaggctggggagagcagccacctcccccccacccccaggtgctgaatttggatgtctgagggagatgaccctgaacacaggtgacttgcttctgtgttgatatgcctctagggggcgctttatctgcctacccttccctgcagggttgcaggttctcttccccagctagcctggccttcctcaggctcctctgaacatcactttggggggacaccatttcctaggggccgccatatgctcccttcacaggtccgcggctcggccaggccatggccagctgtgactcttgcgtggtctctagagtcactgttctgtgtagaaattgtgacagcctagcttcctaggtacggtgacttctctccctagggtggctgagcagtgctggaggttctcccagtatcacagggtaggaggccatctttccttctgacccctccggggacctcattcccactctgttcccactttctgcctccagatctcaactccttccagcagacttctaaatggattgatgacgtcaggacggagaggggcagtgacgtgatcatcatgcttgtgggtaacaagacggatctggctgataagaggtaggcaagcactggagtgtggaggtgctatgactaacgggcccatgcttcctcgcccctctgtggctgttcctgcccaggtctgagatgacagggcagcgaggctgatctccacgcacagggcccccgacacgcctgttagcccccatacactgcaggcttctcatctctgattttcctcagctcagcaaaggcagggcagggcctgtctgcacaggcatttctatcatggtcccaaagtagcctgtgacacagcttctgtccctgggaaatcctggcgttgacatgtgaggtcctcaggtatgagcctgaattatgtcagccgagtaccgactttgtcccctgcccatgcatcctggtttatggctggatctgggcatggagtatttttggaaaaggtttctccgtagctgtcccctgatgtcactgcccattaaggtgtcattagcatatatgtccgctcttggaaccctgtgctaactgggacagaaaagccgtgtgtcgcggtttctaataaagcatgtggcttcttgcagcagccctgccgaggggggagggaaatggtctcctctgcagagcagtatgggccaaggcgagctacttttaattttggtgtttgcattaggaaatgggggctgaggcttcactccaagaaaggctgcatgtgtccaggagatcctgttctaacgactgctgagaaagccgtagggggcgtggctcagtcgcagagcgctcgcctttccaagtgtgaagctcagcatcataaagccaggcatggtggcatatcctacagtccctgctctagggagggacatatcatactgaatcagtagttcagtgtcattcgttgttacatcacaaatccaaggccagcctgggctacataggtaaaaggtagaaggtagccttgcttcctagttcagaagatgtgggaaaatgtggaaaagacttggggttctctgtgcccaggtgccacattcttgctagacagactatagcaggcctcctggcagggacccctgggcaggaaacctgtcttcacggctgaccaatgggcctggcagtccctacagttctttatcgcaggctgcctcctctacttctgccaggggttgcctctctgccccctgattttccttctccccttcatttccaggcagataaccatcgaggaaggagaacagcgggccaaagaactgagcgtcatgttcatcgagaccagcgcgaagactggctacaacgtgaagcaggttaggatacagctggcttgctcgggactggaggccctcccctgaggtcttccttgctctgagtggctagcgactaggatggggcagacagccagtgcatatacttatagctctgggcagtgggggatggcactggcttccagcgctggtaaagctggtggcgtggggggtgggggaggcactccgctagggagccgcgcagaccctgtcagtcactagtctgtctcctcagccatcatcaggtgtgggtccctggagcagcgtgtgtgaatgaaagtccagcatggacttccacctggctgaggaagctgtggttcttagcatctcatttcacttcacatgcaaatgtaggatgttgaatctgatcgacacgttgggcttatgtcttgtacttggcaagaacccggggccatgaagggtaactcagaaatggagcaaagagactcccttggcagtcgggaatcatgggagggagccaaggtgtggctgggacccacaggaccagagtagttggtgggcggagcttagcagctcagccgacctgggcttcagaaaaatcccacaggtattgtgactgctccctcatctgtaaccagctcttcagtgatgaatactgacagccagacagcctcagtgttagcagtgagtcctgtgactgtcccactggcagaacttcacagtatgacagggatcccacacttcacagtactggatctcagcatcccactagccgttagaccacctgtaatcctgatgtgaacatgtatgtttgtaaggagacacggatgtcagcgtggctcagatttatgatccttaaatatttgggaagttttattcagaagcaaacggtttcctttatcatccattataacttgactacatctgaaaaaaacgagtccaccggcttcagcagtgtgaaaggaacccatggctcaaacaaggtgaagaacccctgtctcggagcaggaggagggtggtagcaaggaggaaggacatcctaggcagggctgatgggcgtagagcctggcagcaaggtgcccgtagcacggggagggaccctgagtaaggaacgtggcttgatgccgccgtgtctgctgcggccctcgactgacttcccaggcatacctgggcaccacttggcttttgagagagagtgatggttcacttcatattgatagtgctgagattaaggttgacaaaggagctagaaaggacaaagtaggaggggcactgtggccatattagggaacccccggccccagcttccggaacccagtgcccaattggagggcccttcagctccattcactccagccctttccaagcctctgtatcagatgtgagcctaaccacctcagagaggagaaaaagaggcgggggtggggtgggtggtgaggccgctgctctttgggtccaatgacatcatgggaaatcgaagccgaggacagtatcaggcatccatagagcaggaggcatcttcaacctgctgggccaaggtgagactggtcccttcccccatcctggaatgatctggaatctgagcaagggtttgagcaagagttaagtctggtgggtttgagctgctattgcaattgctacaggctatgcagctcacaggtaacggaaccttcttcctccctgctctgaaggctgaggactccaagatgaatgcgctgggagatccagtgccttgcggactctgctccctcatatttggcaccttccagttgtttcctcacatgaaaggaacgtgaaggctccctcagcttctcttccagtcaggagggctccttaaggcaacacctcctcacaccgccttgctaggagttagattttttttttttcatttgtttagttggttttgttgttcgtttggttggtttgcttttcagtttttcgagacagggtttctctgcatagccctggctgtcctggaacttactctgtagaccaggctggccacaagctcacagagtgctggtgttagagacatacaccaccactgcctggccaggagttaggttttaacttatgaacttgggggagacccagacatccagccaggcttagaatcttctgtgctcttggcttctgcttgtacttgttactttcaagatgtcacctctgccactgtccatctattaggtgcccctgataccttctgtcctcgtgcacactcaattaggtagacttgcacgtcgacccacactccacatgcttgcttctcccacacccactttctcatatacacgcagaaacatggcatttaccatgatacacacacatacatacacacttacacccaaaaacacacttaactttttatacccactctacaaacaatatcaggcataccacgcatagcacacgcatgtagcacaccacattgacacaaattttcacatccttcactgtggctatggccctggctcccaggatctgtgtccctggggagagtcgtttgtcttacgtaaggctagaaactggttttctacacctagtccccatgtgagagtgatggacagacacccactgaagggcctgcttcctgtggcctggatgatttctgtagcagagcaggtcccttgcagtcaccctcatgacccctgctgactgcctgtgggccagcctgcctctaggaagagccccagctttgctgtatgtgtggacatgtgtttgtgtgcaggtgtgtgtgggcatgcatgtgtttacttacacctgtggcggtcacaggttaacttctggtgtcattcctcaggtgtcatccaccttatactttgagatagggtcttcgactttacctgaagtgtaccagttcagctagccagggagccctgggaacctgtctttgtcactccatcactagaattataagtgtgtgcggctacatgcagctttttacgtggattctggggactggatttgagtcctcttgcttgtgtggcaagcactttgtctccctagcccctgttccctcttcctattaacatcctgagtcgctccaggaccaacattgagaggggctatggtgatggcagaggacttagaacaggcctgcactctggggcagtcagtgggcagtcagtggacagacaggccaccaatcctcaggctccgtacacgaggagagcagtacagggggagaccaggagagggaaggagggggactgggcaggcctcaccctgcatctcctgcctgcagctcttccgacgtgtggcgtcagctctgcccggcatggagaatgtccaggagaagagcaaagaagggagtatccttttcctttatcatgtgagtgaaaagatggctccccaagcccgcgagtcgtttagttcagtaagcagatgaagaccaccttgcctctgtcgcagccctccctggtctgatgcagagagccgggccacctctttcagtagccagatgggctccacgttctctgagctccaaaccttctctaaccaaggctgcctcttctttcttagcagtgaggagagacaagggctgtgcagcagtgggggattggagggtggtggctctgtgttgctttgtagtgaacactgcgtgtgtttcctgagtcccctggagatcccagacaaggaagcttccatgcaatgagcacttgatttcaacctgccaatgcttcctccatctgcccactgctctgtggggaaagcttgcccaacactcatccagtataactaaaaacctcgcttacacccagatgatgaatctgaggtgcgtagagcaatccaaggcccgctgtgtgtgtgtaagtcagggaattagcctttacactgagacttcctgcatatctacccctactccgtcctggagggttgtctctcaaggatcccagcgaggcagagattagtagcgctgtaggtggctgaggacattgcccacaagcaggctttctttgaagtttatcagatggccctacctgagcaaaaacccacctgcagagtcaagaaaggagcaggaccgatgggaagccaagaggtgtagtgaccctgtgcccactgggagggacagatagcctgcttttatcctgtccactccaaaggcaaagctgacatactagcatgcatggcggtcattcattcatgttctccccgaggccccggtggcactccatgcaggattcacagttgggtcccccaggctcccacttcagcatgacaactaacgtggcgtcctagtgaacctagcgacccgcccagctttagggagaagagcgctgggcagatggcaagcagatcacacagggcactgtttgcccagctgtggggtgcccccatctggcagatgcagccatccgtaccactcccaggtgctcatggctggagcctcctatgaggcaagactggagcagcctggagcagactctatagacagcccagcaggggacaggtggaagcagctgccacctcagcttggtgctgagccagcacttgtgttgactgatggttcaaacccagatcctgtcatgatgtgttagggatcatgcttgggattgcatcaacatgaggaacaagcacacagaagtgccacttggtgatatatgaacggttctcatgtggccttactccttggactggtgttgggggggggggtgcagagcttctgtcttctgcttccaggtccctagagggtgtctgcacttcacatctgctctgcacaggaagcctgcccagggcctgtctagcaggtccccttacccaccctccagcgcttgatctctcaacaaagttgagctaagggaccacagaaagatagggccacagccctttgctgtatccacacacacagggcactcctttctggaacaagggtttcgtgtgccaaataatgacagtaacttggcagtaactaatagatttctccaccaacgaaatgaaccaattcaagccagatcaaaagtgtaaaggcaggtttattgagaggcagctgtccgacgaggcacacttggaggtcagtaaagtcacacgtccaggctaaagcaagggagttatgtgggttttaggcacagagtgatgacgtgtgagctaggagctgggattatgcctgtgtaaagtagagaagctgtgtgggcactcactgtgcgtggctggaaacagagacagggagaggggttgtgttagcctggaattttcctcttgcagggccgggttgggggaagaacaaatggggtttcttagcttgtgcaagggatatgcaggggctccaaccaaccttcctgacctctttgggtagaaggaagggcactgattcagagctacatcctgctgcagagggagagagtcgggagtcagtgggtccgagttcctcggcaggtatgagtgcagaaggatttggttgacagttactcgggaaactttgagaatccgttctgggagaaagcggaggatgcaaggtgctaggaggaaaaaaatagattaataccacggccctgtgaacggggctagctaggtgcagagtgaagactgccaggaagaataaaacggagactaccctggttgtcttggcagggttcttcagagtttgtgaggtgactcaatgttagcctctactaggccaggtttgctggcataacaacattcttttcccagggacatacaggtgcctcctgagggatgagcctgctgtgaggaggaccaatgctcctcacaggttttgcatggccacgtgaattgatctcatgctggaggagtggccaccaagttgttgatgggcttttggggacagtcagacacctctctgatctcagccacctgtatcccatgccccccgcagtggaggtcacagcagcaatacctgttactactgtgatctgtgtgggcagagggcacctgagattggaaagagctggtaggataggagagcgtggctgtgtcagcctttccataaagcatctggttcggtactggtgtcattgggatacacagagaggaaggatcaccaggaggcaagctttttgctatagagccgctgcaccgaagaatcccctgctgtgcctggggaaaaaaacaaagttgtgttagtagtattgcaaagggagccaggtccagagtagcagaaatggaagtgagtgtctggaagaggagtgcggcttgtatagtgatagcctttggttggagggtcagcccttggcctcacgaagggaccagcaagggaactgctctcagaagagcgcagcccagagcagcccagagagagcagttgttgttgtcaaagactttagagaggttaagtaggattgctccctcctggatgaggcccagccaggggaaaggttcattttctttagtttttacctggggttgggaggagtctctcgggtgtgattggagggactcctgttgtggtgtggtcttggtgaggtttgccgggagctggagggaagagggtctggatgtcgggtctccagatttctctctgttcacatggttacgaggatgtttcgctctgatagacttggcttattaccccgagcccagcggtcattccaaggatctcagacgctaatatagctgtagtttagtggggaatatccagccactgggcaggctcatccctgtccatgctctcagcagctttcttgtctgcaccctcctcggatgttcattttacaagggccccatgagcaacccccttgttctttgaccctttgggaatgacaaacttcctccatctggtggtcgtgggtaaagcattcatagaggagcaatactccctgtgcatttaaagaaagatctgggatggaaataccatcttggcaccccttagaaggacagtctgtttggcccgcgatgtcgttgtgggtttcaccggcttgatcgcagaacatggaagcaacagcagtatgttggagctgatttggtctcacctagctggacaaccaggcaggggtgtctcggtgtctggcacctgtggcagcagagaaagggtgtgacccaggaaaaggaagaggcaaatagagtgaatgttgtcacgtttgaccattcagacctggttttgagaatccctgtagaacctgagagcggtgggtgccaactgctaaacagaccagccatcttgggctggggcctttttgagccgagatagatggtgccaacactgatatcctaggagtttggcagctgagggagtggtgattaccatgtagagtccgatccactggagctctaaagatttggaagacagttgtttgagaagcacctggtcccctgaccccgggaaagggacaggggtgggcagtggctgagtctgctgatattggggtagggagatagttgtcagtgtgtgagccgataagggagcacgggagggatagggtaagtagctgggggagtccgggcccgcggatgttggttgaggagaaacagccttccgtgcatgagctcagaaggactgaggcgcgtaggagaatgtggggtagctcagaggtgagaacacttgggagaagggaaggccagggtaacctgggctcaggtgagagttctgagttgtttgataaggctctctctacctttctcaatgactgggtggcacggaatgtgagattttcgggttcaaggcatccctggcatgcaaaactgagctcctgtgtcccaggagctgtcacatccgctgctcccctggaggtggggagcatttggatccaccctgtaaaagtgtcaacgagggttaggagacggcagagtcttttctgggcagacatgtgtgtgaagtcagtttgccagtcttgtcctggttggtgtccttggagctggtgcagggtctggcgtatctggagagccccctgtgagtttgtcttggcacatgtttgaccggaaggatgaggctgtaaaatatgggctcaaaggtcagtggagtcagtggggaggggcagctttagaaatgggaacagagccttgggtctgatgtgtaggctctggtggatgtctgagataatagaaggtgccaatttgagggggagaataaagctgttatttaggcaaagccatccatcttttgtctgtgtggcccctttgttaaggaatctggctttatcctccatctgacactgaggtttgtaggaagatcgtaggaagaggatgtgccccgtgcgtctgtaggagctaggagccagacctcagaccactgagtcagccctggaattatccacaggctctggatctgtggaggtctggtccctcccttactcctgcgctgacttatggccacctctgcagggagttggagggctccaaaagcttggctataaggggaccacccatggtgtcaaggaaccccctttccttccataggacagaggggctgtgagctacaagaaaggcttactttgagtcagcattggctcattgtcctttgtcaacatggagtgccctggttagagcaatgagttcagccttttgtgaagagaggttccactgcgagatggttcgactcagtcatttcagctgaggtgaccaccgcgtatgccgtctggtgggtcctgagttatctctaagggaacttccatccacaaaaagggtgagttgtgggtctgtgagaggctggtctgggaggctgggttggggtgagcgtaggtcctccacagctctaagcaagagtgggaaggcacatggaggagggtggaccaggaggaacagctgctgggtgtagagcagggctaggggccaaggtgacctgggagtttcccaggaataacagataaaagggttgggcccatgagggtctgaggagagagaaagaagggtggctcaggagatcagagaggcagcgggtagagtatacagtaataggctggagtaaggtgatcttgagtgagttcagccattgctgttaggtctcgcagacatggctgccatcgcacacagtagggtccagttgtttagatagcagagcagtggctggggggactggagagatggctcagcggttaagagcactgactgctcttccgaaggtcctgagttcaaatcccagcaaccacatggtggctcacaactatctgtgatgggatttgatgccctcttctggtgtgtccgaagagagctacagtgtactcatatgtattaaataaataaatctttaaagaagaagaggaggaggaggaagagcaatcaatggctcagtgagagggcccagtgggttggactagggccccagcccctcgtcagtaaagaggtgataggactgagtagagtctgaaaaggccaagactgaggctgctaaaaaggcatctcagagagtagggaaaatgatggtgagctatagctgagtgggtgaggggcccactgggggcccccttgactgcctggtatagtggcttagccatattagctaaatatgggaatccagggtctaaagaatccaaccaagtccaaaaatgaaagaatatgatctgccatagtttggggctatagatctctcagaacccgcgcttgttgagggtcttagagcctcggctaagttgaacaccaagtatatattacagtgggagagcatagttgagctttagatggggagacttgatcccgggtagacaaggtagtttagaaacaagaagttggccgtctgggacaaagacagggaggggctacaaagtaataggtcatctacatactgaagacgtgtatttagcattaaggtctaaggagagagccaggcagtggtggcacacacctttaatcccagcacctggtaggcactggagggcttacggagagggagaatggaagagttgcaagtcctatagggatcagaagtccctgacacgcgaggtgagtattgatggacttgagacagtgacgatggggctcagaagtggggagctggggtctgaaaggggaaagaagaggggtaaaactaggaccggctggtggggcggagcgattaccagggtggagatataccatacttgggggtcaacagggtctggtagagtacatccagggtagtctggcgtagggatctgtgaggcaaccaaaggaagaagaagatgagagtggggagaggttgtggggattcagagaagtggctgaggatattgtggtcaagtaaaggcacagggcagacaggcatgactaggaaagaatgtgtaaaaaatggtcagccaaggatataggaaagtggcatagtcggcatgaaaggaggggatcccatccatcctcatagcagaaactgatgaaggaacagcgggatccgagtgggaggtcaagacagagaaggtagccccatgtccacccggaaggtcatggcacattaccctaggatctgcaagagtgacaggagccctcgagtctgggtgccatcaatcctgtgccaggccgaggagccctaaggcaggaagagtttgtgctacctgcactgatggctctggaccttcgtgacctggcccagaggacaagcccacactggggcattctgacttccagtggtagggcagtgagcagacagcatgggttgctgagggctggggcagttgtgggatcagtggctttgctggccgcatttgaaacaggcccttgttggagttgacattgacgggatggggtctgcgggattgccagtggcctcaggtcagttgccaagtcttaggcttggagtgcaaccttttgctgtagctgagcctgtcgggaagactcagttgcctccccttgggcatcgaataccttaaaagccatctttaccaattcctgtacgggggtttgggaactatcttcagtctctccccgccccctccgaatatctgaagatgactgggaaataaaatgggtagccaggactgtagcccctgccggggaggcctggtcaaggcagatgtgtagaccatggtttgttgtaaccagttttttaatggccaggatttcattagcttcctgtgtaattttgcagagattgccaaaagtcaacaatcttatttgagaccatttccattccctgaaggagacaatggaccgtactctaatcggtggtcaatgtgacctggctaataattccacttaggctctgtggtcagcaccgttgtgtcactcacagggactgtattgtccactaggtggccctggtctgcatactgtctgcctgcagcctgaacctgtccatgttcctcaggagtgagggtagagcctgaatgacataaagatcgtggagttaggtcatagtcctgacaaaggaagcagaactctttaatataggcagatgggatggcagagaaggggcctctccacttttcagtctgggagaagtcttgaagggagaaaggaacatgaactcccacagctgtttctgctccggccacctcctgggagggcagaagagctttggagtattgagactgcataggagaggctacaggggagggttcaggggaagtgagccagggagtgcatggggatcagggtgtgggttgacccctaggtggagcctgtgttggtaatgaaggaggagggacaatgggaggagagaggaggggagggacaagggggacaagagttagggggaggaagttaattgtccttggcttttgtctcagagggaggggaagaaaaaggggtgggtaccagggagaaggctagccaataggcgggttatcaatggtgtaggaaggaggaaggaaggaggaaggagcaggtatagggaggaaggttggccaatagactcaagcttatggtgctataggagtgggagtagtagacagggctggggaaggggttggtgtgcccatgattcaagtggtcccgccagggtaaagggtgtcttgtagtccaagtccccagatgaatgtgtgtctggaggtgtcacagccttggccaacaagacttgagccattgaacactgactacagaagggcggaagtgcagttcccaaaacatttgtacataggggagctcaggccatctgtccatatgccagcagaaaatttcaagatcatgaaggatgttaagtcagtagtacctcctggtggccatttggactcactgtccaaggcgtattgtggccaagccacagaatgaagaggaacttagggtccaagacagccccaacttggataaattgcataaccgccaccacatgggctactgaagattgggtttaaacttggcgttgtcttctcccggacttgccaatgatgcagcgacccatatgatagactgggatcgaagagtgtggggtggagaaaccttggaaaggacgtctctgaatccaaggcctccctagaacaaaacgaatccaaagcctgcctggaacaaagactgagtctttgctctgaatggacaggcttgtcctggctcggccgagacttgtcaggggatccctagcttggtcctgaacctggaagaggcacccggtacctgttaggctgtggctgggaagtggctctcattgagtagagagagggagagaagtggtccccacatggcctgaggcctgacccactggactgggggcccagcttctcccaattcttcagaatcataataggtttctccaccaacgaaatgaaccaattcaagccaactcaaaagtataaaggcgggcttattaagaggcagctctccaatctcataggtggaggtcagtgaagacacacatcagtcagggctaaagcaaggggagtttaggggcacagggagatgatgtgtgagctaagagctgggattatgcctgtataaggtaaagcatattagcccagaattttcttcttgcaggtagggttggagggaaaagagcaaacagggtttcttagcttatgcaagggataaccaggggctctaaccaaatagtaaccatgtgtcccaaggagagagtgttaggattaggcattgggggtaccttggtgggtctgggccaaggtgtgctgctaagagatcactctacatagcagacctcacacacaagaggtttatgggagaggggaggtaaaaggccatcttggagttgagatataagaaacagacagagagactgggaaacagaattaacaagacacacagagagaggaagatcagggatggcttgagacttaaagggtgtgtgtgtgtcacataggggaaataagcagccataggacggtagaaatgcaccacacctggccacagcgggcaatgacataagctactagctctgagttgctgaaggacaagctggtggggctcctgatttatagtattcctccttcttgtttattataaaaggcaagaaaagaggaaggggtcgtggtaaggtggcaatgggggtgcctatgctttttagactgctccctgctatctcagagcatggatatctttggggacccaagaaaactggggtgctggccaactcctgagagtgctggccatttccctagctgtgtaggctctgtgggaccatctggggctagcaaagtgcaggcctagttgaagcagtctgtgaggctggaccacctggggccagccactttcaagctatcctagatgctgactttgagttaacatggggacctggcaggatgctgggacagatacatgcaggagaaaatcttttcttaggtgtacatttgaaacttttagacccagggtcctggtagttgggagaggggagtccccaaaaccaaggaaaggggatcccaccgtcagaaataagtggacagtaggcaggtaggggaacaggctgttgactgacagtacttatctggagtccattcaccaggagagaaggattcatcctattccctgaagcttacgagaacttaaatttacaaaaagaaagaagttttaggcatgttaccattgccactgtttgtaatctacattgaaatccatattgtagagaacagactcgcctttctgtcatagtagaagctcaggatatgattctgggaggacaagctgggggagggcagggaccttctgtggagcagcaaggccaacacacacttgatcttgatattcagtacaagtacagaccatgaaagaggggcttcctccctctgtccggaagactggatgtatctatcagacagacagttttatcagcgcaataaaaagcacctgtaagtctatacttagaagacagccataggaaatctaaaaccttgagcttgtgactgttataaaagcagtagtgcttttccagagctagattgatagcttattagaactgcattgactcgggttaaaactctgggtttttgaagtctgaatacaaccatagcacagcaaaggaaagaaatctgaagcatttttttttaatatataccttgttactttcttacgcctttacaaattgcatttacatgccttagaaacacctcctcagaccctcagacatttgcttagatcctcagagcttaagctttaaacttcacaccttttgttcctacccagccgtcgactgagaacagtcctcggaaagcagaaatagtggaaagttacactggactctatcttgtgagtttgactcttttctgagtctggtaacaaggcacactgggtctcaacccagtaggagctctaggacagtgaagcctggggcctgatttttacacctgaagacaactgagcagcgactgaagccttggttgctgctgttaacaatttaccaagctgtcactagccgagtccttggtgccagagctctgaaaaggatagatttcatttgagttaagtaggaagtaaggccacgtagcttccgaatcaattaaaaatgacagagacttaccagctacctggacagtcaccctagggtgtctctgtggtcattggggacagaggtctcagggctgtgtcagacttcacctgccaggctcagaaggtcctgacagattgtcctgtggagtaagaacttcggggggcacttgcctaccttgtctaggcaaaggaaggcaatctgctccctagtgtcttacttgtcctcaggttggacagtagcatcctagcagcagtagaagtgaggggcagttttgggcccagtgtccagccttgccacatttaaagcaagctccaagtgaaggttcttctgtgcccatcatcttctttgaaggagcttaggggtgctgccaggagctgtcatagcatgtctctctagcatgaaaaccttttttaaaattattattaatttacaatgccatattttgcagatctctgaagcatttgaggaccatctattagtataaatgatttagtggtcaaaggttctccgagaggcatcgcaaaggggagtgaggaggtaaatgacacaattcccatggtgacataaagggggaggtccaaggcctaaggtatcccaaggacttaggcacaagttgaacagtgggtcacctcacacagttctaggaccagggctaaaagcccaaggaggcacgggatgcctggtaccaggactttctaatgaagccagaagatgaaaaccatactcaaaaacaaagcgtcatccaatgggagtgatcaggggtgggttgctctgccagagactctgccagtggacaggaggtatagctcccagttgagtatatacttgatgtgtctgaggccctgggttccagcctcagtccgagtaagtaaataaaccaactccaggtgggaaggtcacgtagctgtggggttctcccaggcccctcagcctcctgtaaggatgatgggtgaagtctgatgctgaagttaggtggcacgtccactggacctcaagcagtgctagggacagagttcactgcgacctgaagaggctccacaaaggaacctggcttagaatgaggccacttagaggcagagatagggagggggcctgaatggggcaaggctgtgtgcggtacttctagatggaatctgttgaggaaggggacagtcttgattgctgggacctccatgtatggtaggggggcaaggatcatcaaaccagagctgattcatgggaaaagactggatgctagtatgagagatcttggatgctgtgcctctgctccaggcgatgggtgtcactgagccggcttagggatgccattctgctgagcaaggggtgaggtggctcagaggggcacctgggaaagatgagaagaccccagtgaggcctgtgctcgggaccagcagtgaaagccaggacctggagtgtcctgggatcagtggggaccaccacagaaccacagttagcagagactagcatcacggtggtctaggaagcgtttgtagagatgtagggagcagaggaaaaggaccatgggatgggagagggcaaagctgagctgagggggagggggaaggaagcaagtttacttatgtgtactctccagtggcatcaggcatgtgggggtaagtacacacacacataccagcaaggtagcactgtatgtttttctgtaagcacacatacaagatagaaggtagggagaaaaatcaaactgaaaatatataccgtgctgtgtgattgacagaaagcataaaatactggctgcaagccaagtaaaacagccaaggcaaagagacaatgaaattcagggtatgttatgccaaaagaacctcatatgttacccccaaagacgggacacagagacatccttagaatgctagcagcaagctccattgccaccccaccccactcagcccagccaaggatctgggtggggctggagagcatccaagggcttggtgcacagtagtggtgagatgtcctggctggaggcaacgctaaagtcttgtacaatcagttagtctgggtttgtagccagagatgatgggaaggtacaggctgccctgcactttgcatccgctcctctggtgttcttggcaagtgtgattcagcccccagcccccagaatgctgtagaaaggggctgtttagtccgtggatgcagcttctcactgtaacggccttgagaagtaaggaccaccacctcacatcctcctgtactttatgatatggacactcaattctgatcctggccaggggactcttccctcccaggcgctttgggggagggccagccgttaaccagctggttgctaaccatctattgctagatgctggagttgaagcacagtttatctgtcaccggaggaagcttctagccagactctgcctggcctctctctgtgtggtgttgatagtgagatcacagcccggttcacactgggtcgacagttttgaggggcggggtgcaggcaggtagagacaggagagaaacgggtgggaagcagttccttcctactccagccgagcgaagagctgaggctgtgggtttgcagagagagagcatggcgtcttggtgagcggcacttcttccttagcccgcctcctacagtgattgacatcaagctggacaagcctcaggagcccccggccagcgagggcggctgctcctgttaatgcaccgcccactcggcttcctcagcgccactcacttgttttgcctcctatagcttcctaacggggtgggaactgagtttatcaagactggaggatctttcttttctctctctctctctctctaggagtagggtgggacatggggagggaggctgggcatcagggaccacgtcactcttaacagctgttacctaaacaactattttttggtttggttgtaatatattgtactttattaagattgccaaaaactgttaaaatttaaaaaaaaaatttaaatcatgtgtatacaactttttgccagattagaaaagtagtcatttttatttgaaagaagtgcttttttgtttgtttgtttttgtatatttgtaaacttacagagaacctctccacacacttcttccttcctgttctcttggaactgtgtgtcacctctattttcctcctacccccgccccccccagcccagaaaattaaagcaattaactgaacagtagtaattacattctagttctgggtcacatggcccaaaccaaccaaacccgcactccacagtcaaatccaactttaatctaacaaaacagcctctgagggggtattgtcgagttcttccctggcagagtgggacacattggcaggcccctgagaggagatgaaggcccgtggactgtagattcagcagcagctccttggctgcttccgcctcttctccttccctgaaaaaaataaccatagagccagaaagcacaggcaacagtgtgttctctgggctgacccggtgacagacagcaagaagttactggaaggatggggtgcgcttggcagctgagggctgaggcagtgtgtaatctactggcccaaccattgacacacatggttaggctgactcgccaactcaatgtgtgatgctgggtggctcagggacactgaagcctagggcacctgccatcactgcaactaccattgaggaagtgagaggagtcggccatgactccggacactccatgttgtcagacccttggatactaatcttgccgaacgttgttctggaaaagctgattccttgatgtgtcctcacctctggcgtggtacgtttgaaatctttgtatgaatacctttgggagtgttggcagctgcactgcacgcatcttggagtcactgtggggtttccagaaggctgctgccccagggtactgcaacttgccccccagcaggctgtccttgctatttccactcattccccagactgaagaccttcagagtctcttagcagagtgctcttctcaaagcagaatagctcttatattctaaacgctcccggactcactgcccctgtctgcctttgggcaggcctggggcagtgactctaatcagagcagcctagccccatagcattggctcttctttcagactgctggtgggcagagtgaattgcctccacaaggcagaactccaacaaggaggttgggatgaattatggaatctctcaaagaatgagttcaaaatggcagcctgtgtggcagggctgattctgtgagtgggcccgtcatgcgactccatcctgggagactgtgtcaaagccggttctgatgatgaagagaggaagcaggaccgccctgggtacctcctccagaaggcaaggaccaatgtacgagcataatcgaaacgtcacgtgtttagtttttatatgtgtgtacataattatacatagagatagacttgtgtatacacccttcgcgcgcacacatacacacactcacatcctcacatatacatgtgctcagtgtatatcctcgtctctcccgctcacaacttggaacttacattgtgattccggtttttggaagttcaaaagtatgcagtgtattgaaataagaaataactcaatattgtcaaataacttgtggttgtcttgccttcaataaaatagtgcatagatgtgttaaactacaagcaaaagtagtccacagaactacctttaccactgctttttgtacctgtgtgcacaggtgtgcatgccgtcgtgggccagtgtcccccactgtggacaccccacccatgtggtgcttgttggaagaaagcatacttagcccgtggtgacagcagcctggttggcagtgaggggctttgctggtggcctctggcagagccccactgacagcactctctactggctttcactgaatgaatgtagggtgaattttaaccttctggacactgaataacctttcttgtattcctgtaactcgaattagaaaatccgttcacttctcttgtgcacacagtctaagacatcatggcctgctactagaaacagcaggtaccatggcagatgccatttctggtcgatctggcctaaggagccctgccttcctagcttgtacacaaaaccccctccttgagtttagactctcccagccctgcggcccctgagaattagggttctgccccattgctcccccactccagaggtgccctggccttatttcctcagccaagctacccatctccttcccaaaaggcaatcaaggcagccaggccccaacagaactaactgtagtggacctgggctttccccctgaccgccaccaccatcctacttgtacgtaggatccaatcaggttctcataaagacatcctgaaattatctgtgcccccatctttgctaaattcagatcagtcagaggacaaaatggagggttcctcttagggcatgatcccaatgtcgtaattcagttcctctctctggacactgcctggcctggcagatgggcatggccctcctccttttctttaagagacttgaaagagagttgtcagcaaaactgtgagcagtgcagagattgtgaaagggcaggtagtgtaagtagtattgttgtggagtcagaggttagaatgctgggtggttagagccttgctgctgccagtcactgctccccgttgccatctttaaacatttcgcaatatctcaagatccaggaaggcatggccatgtcagttcaatgtctcaggcaacaaagacaagggttgcaaggtggtagctaggaatatagacgcctgggcctagtctctgtaacccagtggctaaccagtgtcagagatctaagcagggctggcttcagcctcctgtaggcagggcagtttatcccttttccatatggatgggggagaggctgtcagcaaagtggctgaagagagctaagttagagctacccaagagccagccagcaggagtctgtgtcaaatgctcagggctcgatgctcactagtttctaaactacctctcccccaagaatgggaggcaccatcaccttgccacagcactgggagccaaacccttcctgtttcacgggtgggagaaccagaacagaaaaggtcacctgcaagccagagaggatcagaactagtgttggcattcttgatccgttgctgaccttgcggtgtccagacaggactgctgtgctagcgtcccttaagccatctctactccatggctagtacctaagggtcttcccagcctggctagctagagagaagataggtgcattttgggctctcactgtaaagaagagtggtccccaaatctacttgcattgtcttgtgtacacacacacacacacacacacacacaccccagtagtcagggtacccttttaatttttgtttgaaatcaacttcttcactgtttggaaatcttgcagtttcaatgtgcacactccttggactccagaccctgtctgattgatactctctgcagggtataattatcaggaaatccacgcagcgggagttcagatgggcccttcaggaggcaggaagcctccatagcaacgaaggccagcctgccattgtgatgtgttgacttctcacctcacctgtcctttaaagtgaggagcagagggcggcatttctatctgtactgggctcagaaggcacagtggccatattgactttacattcaactgtgtaatatgtggaaaagactcagcatgttggtcaaacaataaactgtcctaattctcga

SEQ ID NO: 14 - DNA, 73197 bp, Mus musculus; identical to SEQ ID NO: 13

SEQ ID NO: 15 - DNA, 4064 bp, Homo sapiens
agcggagggccgtaactggggggagctcctgactccaacaccccacccaactccctcctagggagagagagctgtcaacctccaaaaccaacccagggaaggagtgaggtcgaggccaaaacttggacaatctctgcacatcttgcaattcaatctggagcccctttgctgtctttccttttcctgaatctactctcaatgttgacagcactgtgcgatttctgtatttgccaggggcttctcgtgggaggtcggctccagccctctcgagaaccctccggagaccgtggggatgaggcagcgctcagccagagaagccctggagcccaggaccagcgcttcaagtgcaccgggcgggaggcaggggcgcagggagggaggctctggaccggccgcccctgctgactatggccccggtgcaggtcaaggcttgggcccggggatttcctttcaaaggtgacttagagccgcttcattagggtagcgccctcccaggcgggccctaatggcgtgtttggcagagtcagcgaaaagcagcgccctgcggctccagcggcgggggagcgccctcttccgcgccctcgccctctcccgtgtggggcagctgcgcgcacggggccatttgcagcgcaagcagcctagcgtgcggccgcggcgcccaggtcggaaaggaggcggcatcatggagctgaagaaggacatcaacgctgtatctatcgacatgctgctgatcgtgcactcggagaagcggcgcgccgcacagggattccaaggtgttggaaatggagtccgaagatggcagaaattagaaggaaatgactttcacgaaaacttggtggagaagcagcaccctcagcagccccaggtcatcacttcctacaacagccaaggttccagggattctggcatggatatctctaaaggccattcttcagcctatcccaggggacaatttaaagtggagtaggtgagaaaggcctcactgagaaagtgacatctaagcaaggaaagagggtgtcactctgtggcccaggttggagtgcagaggtgcgatcatagctcactccagcctcaaactcctgggctcaagcaatcctccttcctcagcctcccgagtagctgggaccacagggacacaactgactgtggaagtccaccctcgagatgccatgccccagctgctcaagaagttctccttggctaaacgtatgtatgacacaggtactcatggtggagggctggcagagaggattgaaggcagctggttgggccagatcccagcccaagcatcttctgagggaaggagaagagtgacatgggcctgcaaactgggaaaaggcagaagcatgacagctttatcctgggagactcttttctctacacccagctaccgctgattttgcatctctggaactagtcataggtttacaaggtgataaaaatggaaacacaagaccccggcaacctggagggaaagatgcccatgcctacccctgggatcgatctagcctgaaatccatgtccctggacctgcagcagtttgagaaattggatatctacgcctcacaggtgacagccaagagtggcctagacgaactggtgagtgacctgctccaggaggcccacactgacctggaaagggtccgcgccatctggatctggatctgccatcacatagtttggaatgcagcttagagaatgagctcgcctggcacagagtatgacattgcagctgctcaggagaaggaccgccaagccttcaaacccactgacatcctgcggacccagaagaccaactgtgatggctatgctggcctcttcgagagaatgtgcagagctgcttgaggagcgtgtcaagcaggctctagggatgaacatttcagaagtgatctgaatggtgttggtctcaggggaggagcagacagcggagactgcagccagtctgtaccaacaggaccagccagcactgtatctccctgtccccagtgccccgagataaaagccatcaaggctgtttatatgctcgccggagtgcagtgtatgaccgtgcctggctactccaagggtttcggctaccagacagggcagagcttctcgggggagtttgaccatgcctggaatgctgtgtacctggagggaagatggcacctggtggacagcacctggggcagcggcctggtggacaccatcacctccaaattcaccttcctctacaatgagttctacttcctcacccaccctgcactgttcatcgaggaccacttcccagacaacaagaactggcagctgctaaaacctcctcaatctctgaggcagtttgagaacaacatgtatcacaagagtgaattctacaacaaagggatgctgagtgcccacccagagacttccatgatcagaacaggtgagcccggagcaggtgccagtgtgctagcagcaggaatggagcatttcgcactgtcctccaggagcccgcctgagactgcgctttcaaggcatgcccttccagacgcatggcttgtgagcttagcacaaagcttgtgtgtgcatgtggatgagtggaggctgctgaggcagcccaggccatcagggcagggaagggccataggccacatcagcagggacaaaagctcactcacactagcataaacccagaaagggatgtgtctgaaggctgcaggtttcctagaacttgaaggctgaacacacagcctggcatgtcacagaagccagggctgggcacttcctagctgggtgagtctctctcagttcacatagcagggaaaaggactacgtcaccctggctacacatagcctctgggctcaggtccccaacagaagctactggcctgctgtgttctcttccccaactcctgctggagagaatacatggcctcagcagagctggaatctgggtgttggtggtccaaccagcaaggatggggagcaacatgggtctcacaggacaggtgggggcagtcccacccaagacagagagttggggcagacttccttagggaggtggccactgagctgggtcttgggagaggagaacaggcctagtagctagacagagatggacatgttctaggcagcagaggagaggcggggacacagtaagcccccagcctccaaactcaggcacccctggatgagggccaagctccagcacctctgcctggctggctcagtacccctcccttctggaggtgggacccagccgtttccagcccactcccctggggcagtataggatacccagcttagccatctcccatggctggcctgggctgacatgtgctctcccaaccttcaccacggagccatggcagctgagtatgtttgcacactctgaggcatacgggggctgccctggagggccagaactggtcacaaaaaagcagggccttctctggaagattgtctcttatgcctctccaaggccttggcacctgatccagtgctgggcacacagcctgggcacgctgcacagccctgtaagtcgggtcagtccagcctcccacacctcagcaaaggactgcctggtggcaccgtctctgccactggggcctccatccgcccaggacaggaggtctgagctcacactgactattagcacagggtgcctgtgggtgggcccagagcccctggggagctccaacccacattgcagggcaatggggcagcggggagcacaggtgtccccaagttagttccaactgacttgtcccttccaccacacaatggcttcctttgccaagttgctgagctcttgcaaactcttccaactccaaatacctggcagctcctgcagctaaaataacagcgtgaagttgctcaatttgagaatccatttcctgtgcttacaacagatgcagggcttgttcaatgtatcataggccgtggaaatatcggaaagaactgaccaggtcaaagcaacaccaaactgatgtcattgagtggagtttgcctttttaagagacataaaaatataaacaccagattccttaatttatagaaatctaaacctaaatatgattccatatatctgaaaaaaaaaaaaaaaa

SEQ ID NO: 16 - DNA, 2072 bp, Homo sapiens
caggatgtaccaaacgtggaagcggagacggggaggtctgggggtgccacgcaagtccctttcctcccgacacgagtgcagtaaagaaaaacggttatgagcgtaaagtgacagcctcggccgatgggaatagggggaagtccgacactgagcaacgaacgcattcccgcgcctccaaaacctaggccgggggcgctggaaacccttaccggcacccggccaccgcggcagacgcttgctcctgccacgcccccccccctcccccgcatcacgtgtctgcactcgctttcctcggattcccggatgtggttgccaaaacaaaggggatttggtgatggaggctttgttagaaggaatacaaaatcgagggcatggtgggggatttttgacatcttgtgaagcagaactacaggagctcatgaaacagattgacataatggtggctcataaaaaatctgaatgggaaggacgtacacatgctctagaaacttgcttgaaaatccgtgaacaggaacttaagagtcttaggagtcagttggatgtgacacataaggaggttggaatgttgcatcagcaggtagaagaacatgaaaaaatcaagcaagagatgaccatggaatataagcaggagttgaagaaactacatgaagaattatgcatactgaagagaagctatgaaaagcttcagaaaaagcaaatgagggaattcagaggaaataccaaaaatcacagggaagatcggtctgaaattgagaggttaactgcaaaaatagaggaattccgtcagaaatcgctggactgggagaagcaacgcttgatttatcagcaacaggtatcttcactggaggcacaaaggaaggctctggctgaacaatcagagataattcaggctcagcttgtcaatcggaaacagaaattagagtctgtggaactttctagccaatcagaaattcaacacttaagcagtaaactggagcgggctaatgacactatctgtgccaatgagttggaaatagagcgcctcaccatgagggtcaatgacttggttggaaccagtatgactgtcctacaggagcagcagcaaaaagaagaaaaattgagggaatctgaaaaactattagaggctctgcaggaagaaaagagagaattgaaggcagctcttcagtctcaagaaaatctcatacatgaggccagaatacaaaaggagaagttacaagaaaaagtaaaggcaactaacactcaacatgctgtagaagctataagtttggaatctgtgagtgcaacgtgtaaacagctgagccaagaactaatggaaaaatatgaagaactgaagaggatggaagcacataacaatgaatacaaagcagagattaagaagttgaaagaacagattttacagggtgaacaaagttacagttctgcactagaaggaatgaagatggaaatctcccatctaactcaggagttacatcagcgagatatcactattgcttccaccaaaggttcttcctcagacatggaaaagcgactcagagcagagatgcaaaaggcagaagacaaagcagtagagcataaggagattttggatcagctggagtcactcaaattagaaaatcgtcatctttctgaaatggtgatgaaattggaattgggtttacatgagtgttccttgcctgtatctccccttggttcaatagctaccagatttttggaagaggaggaactgaggtctcatcacattctagagcgcttggatgcccatattgaagaactaaaaagagagagtgaaaagacagtgagacaattcacagccttaaagtagcctcttaaaaaaatcacaatcttggaaataaaaataaacaccaaagagttactgtcatctgaagtagcagctctttaaaaacatgaagagataaaattataaaaatgatacatctaaagcagtggtgaagaaagctgaaaaactgatacttttgataggcattttctctgcactggtttgtttaaaggacttcttccagcaataagttgaaagaataaaccactttgctagacaaaaaaaaaaaaaaaaa

SEQ ID NO: 17 - DNA, 1201 bp, Homo sapiens
gcaggagcaagcgtctgccgcggtggccgggtgccgatttgacaagatcaaagctgcaggaaaatggacagtgaggttcagagagatggaaggatcttggatttgattgatgatgcttggcgagaagacaagctgccttatgaggatgtcgcaataccactgaatgagcttcctgaacctgaacaagacaatggtggcaccacagaatctgtcaaagaacaagaaatgaagtggacagacttagccttacagtacctccatgagaatgttccccccattggaaactgacgcttggctcctttcttgtggatggattttctcaaagtacacagataaagcacggtttgtttcagtctccaaattcaaacctttgagtaataaatcagcactcaaaaatgtacacccatttagtttgtggtagcaaagtgcaatgcgaaattgaatgagaaactgagatttctcagtaatggtgaatatttcgctctttaaacctaaaactcttcattgagtagcttatatttgaacatgattggttaaacatttgcctctacctctgattttgctttgctgtcaaagtttaacaccttccaactacttatgtgtgtcctgtaacacaggtgattgaacgtatgagagggaaaggcaaagaaaaaggaagccagacactaggagaattattaacttctcatacttccccacattgagaagcattcggagtgtatttagcctgtagatgttgtgatatgcaaatatcccattccctggttactggcattcctaagattcttcatggtattttcaaactttggataaatttacagattagaaagatatctgacagttaatctctgttctccttacaaattccttttgtgctgctggaaaggatctttggctaggtggatgactagttttattcaaagccttttctcaaagccctttcagttacaaccaccccactatggaatcagtatttagttatacatttgtataagaacctgtattttgaaaaacacattcatgtatatttattcctggaattatttgcctgttaaacagtgtctttcatgttctctccccagattgtaaactctgtaagaagctgcttgtatctgtatcccttgttgaaactctgaaaacactgaataactaaaatctcttctcatccttacaaaaaaaaaaaaaaaaaaaaaaaaaaaaa

SEQ ID NO: 18 - DNA, 3191 bp, Homo sapiens
gtcaggatcctgcaggcccaggtgcctcctgtgttcctccaacagcagcagcagtaccagtacctgcagcaatctcaggagcacccccctcccccacatccagctgctctcggccatggccccctgagctccctcagtccacctgctgtggaggggccagtgagtgcccaggcctcctcagccacctcgggcagtgcccacctggcccagatggaggccgtgctgagggagaatgccaggctgcagagagacaatgagcggctgcagagggagctggagagctctgcggagaaggctggccgcattgagaagctggaaagcgaaatccagcggctctctgaggcccatgagagcctgaccagagcctcctccaagcgtgaggccctggagaagaccatgcggaacaagatggacagtgaaatgaggaggctgcaagacttcaaccgggatcttagagagagattggaatctgcaaatcgccgcctggcaagcaagacacaggaggcccaggccggcagtcaggacatggtggccaagctgcttgctcagagctacgaacagcagcaggagcaagagaagctggagcgagagatggcactgctgcgcggcgccatcgaggaccagcggcggcgtgccgagctgctggagcaggctctgggcaatgcgcagggccgggcagctcgagccgaagaggagctgcgcaagaagcaggcctatgtggagaaagtggagcggctgcagcaggcgctcgggcagctgcaggcagcctgtgagaagcgggagcagctggagctgcgtctgcggactcgcctggagcaggaactcaaggccctgcgtgcacagcagagacaggcaggtgccccaggtggtagcagtggcagtggtgggtctccagagctcagcgccctgcgactgtcagaacaactgcgagagaaggaggagcagatcctggcgctggaggccgacatgaccaagtgggagcagaagtatttggaggaacgtgccatgaggcagtttgccatggatgcggctgccacggctgctgctcagcgtgacaccactctcatccgacattccccccagccctcacccagcagcagcttcaatgagggtctgctcactggtggccacaggcatcaggagatggaaagcaggttaaaggtgctccatgcccagatcctggagaaggatgcagtgatcaaggtccttcagcagcgctccaggagagaccctggcaaggccatccagggctccctgcggcctgccaagtcggtgccatctgttttcgcggctgcggcagcaggaacccagggctggcaagggctctcttctagtgagcgacaaacagcagacgcccctgctcggctgactacagacagagcacccacagaggagccagtggtcacagctccccctgctgcccatgccaaacacgggagcagagatgggagcacccagactgagggccccccagacagcacctccacctgcctgccaccggagcctgacagccttctggggtgcagcagtagccagagagcagcctctctggactctgtagctacatccagagtccaggacttgtcagacatggtggagatactgatctgaaggaggtggtgcttcaggactctgagccattctctcccctcctctgccctgtgccactctcagccatttcagcagccccgtcaaccgctgctccgtccctttccccagccagacactcattcccattgaccatctggtcccaggagctcaggaggaggaccccaggggagaggagagctgtgagagcaccggcacccccagaagactctgcttcttagcccacattcctccgggccttatggagaatgaggattcagccttgacttcttgcccaaggcctgctactggggtagcaactgacagctcagaaaggagctgagctccctctgccctgccagttgtcagtcaggcagggagggagtggctgtgttggtttggggaactaatttccacggacggctgcccgtggacaccaggtggactggttcactaatcaagtcagccatattgttctctggctaagtttggttccagccaacgtcatctgctcttcagttcctcactgccttcttgggatactaagacttgaattttttggggactattaagggtgttagtcttggagaagacacagcctcaccttctcacttgctgtgggtgaggggccatttaagtggactgggagacagtgcgcagtttgtatataattccctttcttgtggaacagaagactgaggcctgcaggttccgatgtgtctccatgggctgtgctcccctcttcctactgtcagtttctgaaacttctgactggcctcccagttatgcctcctcctcaagttcctggcccgtggatgttaaagctgctcgattcccaggatctcggctgccttttcctctatcttgagccctataaatgcccacgggacccccaccaccagcctcttgaagtggctccacagctcctgtccctggaacatcctgtcagtttggtcataaaccctgagccagatgaaatgagccaccgtgaacagacatctgccatgcccccaggtgggcttcggtggccctacccggtaccagttctttctgagaaactggagatgtcttgttagcataagtgtcttcattcccacctggagggtttgggagaggagcaaagcagttgaaaactagttaatgagctacaagagtcaaatagtcctctgaatggagcccccatcacaaaacagtgcccaggaggctggctcctcaagctacccatgcccagcgccctaaagcagcaccagatgctttggaattggggtgaaacacccacatggcagcctgctagcagcagtgactttgacttctggtcttaaagagtccctcacttcagccccaggagctattggtgggttttagcagttttgtctttaccgtttttagttctccttgattctttgttttcttcctttatcgtttttaggtttggtatgtgttgttttatttccatggttcctcaagtttcctttttaaacatttgcatttgctggacaattgcaattttttttaaaaaattcccctacccctgtttaaagctgaaaaatacatttggttcatgtgcattgtttacaaagcaaaaagaaaaaaaaaaaaaaaaa

SEQ ID NO: 19 - DNA, 2942 bp, Homo sapiens
cggctcggggctgtgagcggctcggggccgggggtgggcggcggtgcggcgggcggccgacgctcctcttcggcggcggcggcggcggccatgcgtggggcggcgcggctggggcggccgggccggagttgcctcccgggggcccgcggcctgagggccccgccgccgccgccgctgctgcttctgcttgcgctgttgccgctgctgcccgcgcctggcgctgccgccgcccccgccccgcggcccccggagctgcagtcggcttccgcggggcccagcgtgagtctctacctgagcgaggacgaggtgcgccggctgatcggtcttgatgcagaactttattatgtgagaaatgaccttattagtcactacgctctatcctttagtctgttagtacccagtgagacaaatttcctgcacttcacctggcatgcgaagtccaaggttgaatataagctgggattccaagtggacaatgttttggcaatggatatgccccaggtcaacatttctgttcagggggaagttccacgcactttatcagtgtttcgggtagagctttcctgtactggcaaagtagattctgaagttatgatactaatgcagctcaacttgacagtaaattcttcaaaaaattttaccgtcttaaattttaaacgaaggaaaatgtgctacaaaaaacttgaagaagtaaaaacttcagccttggacaaaaacactagcagaactatttatgatcctgtacatgcagctccaaccacttctacgcgtgtgttttatattagtgtaggggtttgttgtgcagtaatatttctcgtagcaataatattagctgttttgcaccttcatagtatgaaaaggattgaactggatgacagcattagtgccagcagtagttcccaagggctgtctcagccatccacccagacgactcagtatctgagagcagacacgcccaacaatgcaactcctatcaccagctccttaggttatcctaccttgcggatagagaagaacgacttgagaagtgtcactcttttggaggccaaaggcaaggtgaaggatatagcaatatccagagagaggataactctaaaagatgtactccaagaaggtacttttgggcgtattttccatgggattttaatagatgaaaaagatccaaataaagaaaaacaagcatttgtcaaaacagttaaagatcaagcttctgaaattcaggtgacaatgatgctcactgaaagttgtaagctgcgaggtcttcatcacagaaatcttcttcctattactcatgtgtgtatagaagaaggagaaaagcccatggtgatattgccttacatgaattgggggaatcttaaattgtttttacgacagtgcaagttagtagaggccaataatccacaggcaatttctcagcaagacctggtacacatggctattcagattgcctgtggaatgagctacctggccagaagggaagtcatccacaaagacctggctgccaggaactgtgtcattgatgacacacttcaagttaagatcacagacaatgccctctccagagacttgttccccatggactatcactgtctgggggacaatgaaaacaggccagttcgttggatggctcttgaaagtctggttaataacgagttctctagcgctagtgatgtgtgggcctttggagtgacgctgtgggaactcatgactctgggccagactccctacgtggacattgaccccttcgagatggccgcatacctgaaagatggttaccgaatagcccagccaatcaactgtcctgatgaattatttgctgtgatggcctgttgctgggccttagatccagaggagaggcccaagtttcagcagctggtacagtgcctaacagagtttcatgcagccctgggggcctacgtctgactcctctccaatcccacaccatcaggaagaaggtgcctgtcggggctcacttgaagcctgtcagggatgctttgtatctaacacaacgccaacagaagcacatttgtcttccagaacaccgtgccttagaaatgctttagaatctgaactttttaagacagacttaataatgtggcatattttctagatatcacttttattaggttgaactgaaagggtttttgtaaattttttggccaaaattttttaaaacatacttactttggactaggggtacattcttacaaaataaataaacagtttttaaaattgtttagacacagatatttggaattagctatcttagtgccaactgctttttatttttttacttcatcaaggtgatgtaagtgactcacctttaaagtttttttagtgttattttttatcactactctgggaaatggtttgtcttcaagatgcaatacttttcttagtaaaggaaaaacagcataaaaagatacctggtctgccttgtacaagaaaaggcaatattagaggaagaaaatttaaagaaaagctagaggaaaaaaaaatttttttaaaaatacttattagaagcaaactgcccttgcatggaaaactgtttatttttttcagtgaaaaggaattctgctttcgtgtttttgggaaagcaggaactgagttcattacatctttaatttggcagaaattagcctttctgtgaaccagatgtggtttggggcagatctgtagtaaacaatggtgattttatttatttttactctctggaaaaggagataatacaattccagaaagtgaactcatatttctaaggttaagattcccttttattgcacctagaatagtgctatgcacagagcgggtgcttgagttgttgtcgttttttgtttgttttttaaatgtaaactggtaaattttgtgcttatcttcaaggctggcttaagtataaaattgttttttaaacacttgaaaaattaaaggatttgttttatatt

SEQ ID NO: 20 - skipped

SEQ ID NO: 21 - DNA, 4079 bp, Homo sapiens
cctccggccactgccgccgcggtcgcctctcacccgcccggccgctccagcccgaggcgccccgaccccgcgccactccgcgcccggccagccgcccgcagccatggggctcctgcccaagctcggcgcgtcccagggcagcgacacctctactagccgagccggccgctgtgcccgctcggtcttcggcaacattaaggtgtttgtgctctgccaaggcctcctgcagctctgccaactcctgtacagcgcctacttcaagagcagcctcaccaccattgagaagcgctttgggctctccagttcttcatcgggtctcatttccagcttgaatgagatcagcaatgccatcctcatcatctttgtcagctactttggcagccgggtgcaccgtccacgtctgattggcatcggaggtctcttcctggctgcaggtgccttcatcctcaccctcccacacttcctctccgagccctaccagtacaccttggccagcactgggaacaacagccgcttgcaggccgagctctgccagaagcattggcaggacctgcctcccagtaagtgccacagcaccacccagaacccccagaaggagaccagcagcatgtggggcctgatggtggttgcccagctgctggctggcatcgggacagtgcctattcagccatttgggatctcctatgtggatgacttctcagagcccagcaactcgcccctgtacatctccatcttatttgccatctctgtatttggaccggctttcgggtacctgctgggctctgtcatgctgcagatctttgtggactatggcagggtcaacacagctgcagttaacttggtcccgggtgacccccgatggattggagcctggtggctaggcctgctcatttcttcagctttattggttctcacctctttccccttttttttcttccctcgagcaatgcccataggagcaaagagggctcctgccacagcagatgaagcaaggaagttggaggaggccaagtcaagaggctccctggtggatttcattaaacggtttccatgcatctttctgaggctcctgatgaactcactcttcgtcctggtggtcctggcccagtgcaccttctcctccgtcattgctggcctctccaccttcctcaacaagttcctggagaagcagtatggcacctcagcagcctatgccaacttcctcattggtgctgtgaacctccctgctgcagccttggggatgctgtttggaggaatcctcatgaagcgctttgttttctctctacaagccattccccgcatagctaccaccatcatcaccatctccatgatcctttgtgttcctttgttcttcatgggatgctccaccccaactgtggccgaagtctacccccctagcacatcaagttctatacatccgcagtctcctgcctgccgcagggactgctcgtgcccagattctatcttccacccggtctgtggagacaatggaatcgagtacctctccccttgccatgccggctgcagcaacatcaacatgagctctgcaacctccaagcaactgatctatttgaactgcagctgtgtgaccgggggatccgcttcagcaaagacaggatcgtgccctgtcccctgtgcccacttcctgctcccggccatcttcctcatctccttcgtgtccctgatagcctgcatctcccacaaccccctctacatgatggttctgcgtgtggtgaaccaggaggaaaagtcatttgccatcggggtgcagttcttgttgatgcgcttgctggcctggctgccatctccagccctctatggcctcaccattgaccactcctgcatccggtggaactcgctgtgcttggggaggcgaggggcctgcgcctactatgacaacgatgctctccgagacaggtacctgggcctgcagatgggctacaaggcgctgggcatgctgctgctttgcttcatcagctggagggtgaagaagaacaaggagtacaacgtgcagaaggcggcaggcctcatctgaccccaccctgggccactgccctgctccagagagtggaccttgactcttccacacctgcctatactcactaatgttaacacgtcatttcctttttgtatttttaaacaagaaagaaaaccccagtcctcatttgccttccctacctcttcctcccagagtcctccccacagttcctaagggccactgtgtacccgggctgtgtgggccagaactggggggctgagtcttccctggccccttggaagaggcccccagatgcccaggctcacttcagtgttgagtcctccattgaggatgcccactgaggcagccaggcccctcaccagccctggggggaatcctaaacagagagagaaaaagggtatctgcccttcttgccaggcagctccactctcccgctgactgcccacaccctgcagagtggcaggggtgaaaggaagaaggaagtggctgagttattaatagccagagccactgggagactggggagactggctgtaacccccttcacacctgggtttggcatcagcacagactacgggaggggctggctccctccccctcagaccctcacttcctgtacctagaggccattctggatgctgccatgttgggaagtacagtctctgcccattacctgcatgcaggcaccagagcagggactgagaaaccccaaggatgggtcatctaagtgctgtccatatgaaccctggactttctgtccttagatcctcacatgttatccctgtctttctggggtacgtttcaaactgaggaagctacaacacagtgaagacccaaggaaggcctatgaaatggtcctgatgcccaacctcccaccccttcaatgtggggacgagaccccctcatctcagagtaatgggaagaacctcccacatctccctggcagcagatgaggtggcttcacatgcacttccctgtctggacttcagcccgtattccgaggagtagagaggcagaagagatgtcagcaaagcaagtgatgaagcagagtggatgtccactgtcaccaagctggatggcaagctgcggcccacaaaacagccagtcaggttggctttcctggtttcagacatgctcataccattcccattttctcagcctcttctcactgcctccagagaggtgggtgcctgggttgagagacacagctgctacgtgatagatgttgagagacagaagccaacgaaggaggtcattcatcaacaaatatatttattggagaccgactttgtgcaaagcaatgctaatcagggttctccatggagcttccctcagctcttacctcacctccctccatttacattagggccttctcccagggtgtgctcggtgggcagtgtgggactgggggtgtgggagttggtgagagcaggaggagaggtggggacagcaagaagccacagattggcatgaaggatcctgacctgactatccatgccatccatggcccccagactgactctgcacctggccctttgccagacagctctgtctccccatgtcctctggaacagctgggcatgggtcatggccattcatgacccttaagtgccacccttcttggaagaccccctccagaagcatactggaagccacctctggaaaagcctcatatggtgatatgccaaaatatttatgtcaatgtccaaacaaagtccaatgccatgagactgaagtctttgtggaaaccactgttacagacaagcttatttccaaagccacctcatttccaaacatctcactcaggaagggaggctcaatgtaacctcaggggccagttttagcatttgaaatggttctgcttggaaaatgatgccctgcaactaaccctggtctttcccatggcaatttaaccacatttggaaggcactgccttcagctgagtttatgaacaatgaatgccaaccttcaggttctagaagattggttgcactcccaaacctttattctattatattactattaaaatattctaattttgctattgaaaaaaaaaaaaaaaaaaaaaaaaaaaaaaaaa

SEQ ID NO: 22 - DNA, 1830 bp, Homo sapiens
gctgtaccggggaccacgcgtctcatccatggcttccgcggactcgcgccggctggcagatggcggcggtgccgggggcaccttccagccctacctagacaccttgcggcaggagctgcagcagacggacccaacgctgttgtcagtagtggtggcggttcttgcggtgctgctgacgctagtcttctggaagttaatccggagcagaaggagcagtcagagagctgttcttcttgttggcctttgtgattccgggaaaacgttgctctttgtcaggttgttaacaggcctttatagagacactcagacgtccattactgacagctgtgctgtatacagagtcaacaataacaggggcaatagtctgaccttgattgaccttcccggccatgagagtttgaggcttcagttcttagagcggtttaagtcttcagccagggctattgtgtttgttgtggatagtgcagcattccagcgagaggtgaaagatgtggctgagtttctgtatcaagtcctcattgacagtatgggtctgaagaatacaccatcattcttaatagcctgcaataagcaagatattgcaatggcaaaatcagcaaagttaattcaacagcagctggagaaagaactcaacaccttacgagttacccgttctgctgcccccagcacactggacagttccagcactgcccctgctcagctggggaagaaaggcaaagagtttgaattctcacagttgcccctcaaagtggagttcctggagtgcagtgccaagggtggaagaggggacgtgggctctgctgacatccaggacttggagaaatggctggctaaaattgcctgagaggcagctctaaagcacaagacctggatgtgtgacacacagttttggaaaaaggtctgtggtagtctggagttgatgaggaaggggtacaagatgtggttagaaacatttctttgttctggaaacaaagtactgttgaaaccagcttggaatttttttttttttttttttttaagttcagttctcccttatggctgcctttcaaacaagtaccttttatctgatgcctgtatcttccctttgttaaggtgtaacttgatgtagggtcaaggtttttgtgacaacaggcagactccacacagagaggatatgatgagaatatggccatcacctgaaaagttttcttatcttctgtgcttttggtccctggaaacaaatccgcctatgtatgaagctagttgatttccagttgcactatttccagttgcctctgaagttcacaggcaatacattgtctagtcctttgcgaatttctctgatttgtgggcacagttatgaagtttccccacatgtgaagacaggtacaaaatagcagagccaagcagacagtgggtctattcttcattagctcagtgacttgtccacactcgtcttagcacttacgtttcaaaagcttgtcacaaacccttggagtcattcccagataatagaactggaaatgataaatcccctaatgccaagggtctagtgtgttcttagtggttatactgggaagtgtgtggagatttaggtgctgctctgctgctctggatggctgaaggctcctgggccatcttcatgtgctgcttgaagagctcctattttgtactcctggctagaatgctgtggaacaaatacaaagtgaaaaaagttctctgtagatttctgaagtgcatattcattgatgccaagaaaaaaaaaaagttgcctttttgaaaaaaaaaaaaaaaaaaaaaaaaaaaaaaaaaaaaaaaaaaaaaaaaaaaaaaaaaaaaaaaaaaaaaaaa

SEQ ID NO: 23 - DNA, 2808 bp, Homo sapiens
tggcaccgagcgagccgcgatgacaatggctgcattgtgcttcatgtcccttcccatcaacatttctgtgctggactccttccactcgcgggtcgtctccagagctcagaaaatgaggtgatcagtgggacgagtaaggaaggggggttgggagaggggcgattgggcaacccggctgcacaaacacgggaggtcaaagattgcgcccagcccgcccaggccgggaatggaataaagggacgcggggcgccggaggctgcacagaagcgagtccgactgtgctcgctgctcagcgccgcacccggaagatgaggctcgccgtgggagccctgctggtctgcgccgtcctggggctgtgtctggctgtccctgataaaactgtgagatggtgtgcagtgtcggagcatgaggccactaagtgccagagtttccgcgaccatatgaaaagcgtcattccatccgatggtcccagtgttgcttgtgtgaagaaagcctcctaccttgattgcatcagggccattgcggcaaacgaagcggatgctgtgacactggatgcaggtttggtgtatgatgcttacctggctcccaataacctgaagcctgtggtggcagagttctatgggtcaaaagaggatccacagactttctattatgctgttgctgtggtgaagaaggatagtggcttccagatgaaccagcttcgaggcaagaagtcctgccacacgggtctaggcaggtccgctgggtggaacatccccataggcttactttactgtgacttacctgagccacgtaaacctcttgagaaagcagtggccaatttcttctcgggcagctgtgccccttgtgcggatgggacggacttcccccagctgtgtcaactgtgtccagggtgtggctgctccacccttaaccaatacttcggctactcgggagccttcaagtgtctgaaggatggtgctggggatgtggcctttgtcaagcactcgactatatttgagaacttggcaaacaaggctgacagggaccagtatgagctgctttgcctggacaacacccggaagccggtagatgaatacaaggactgccacttggcccaggtcccttctcataccgtcgtggcccgaagtatgggcggcaaggaggacttgatctgggagcttctcaaccaggcccaggaacattttggcaaagacaaatcaaaagaattccaactattcagctctcctcatgggaaggacctgctgtttaaggactctgcccacgggtttttaaaagtcccccccaggatggatgccaagatgtacctgggctatgagtatgtcactgccatccggaatctacgggaaggcacatgcccagaagccccaacagatgaatgcaagcctgtgaagtggtgtgcgctgagccaccacgagaggctcaagtgtgatgagtggagtgttaacagtgtagggaaaatagagtgtgtatcagcagagaccaccgaagactgcatcgccaagatcatgaatggagaagctgatgccatgagcttggatggagggtttgtctacatagcgggcaagtgtggtctggtgcctgtcttggcagaaaactacaataagagcgataattgtgaggatacaccagaggcagggtattttgctgtagcagtggtgaagaaatcagcttctgacctcacctgggacaatctgaaaggcaagaagtcctgccatacggcagttggcagaaccgctggctggaacatccccatgggcctgctctacaataagatcaaccactgcagatttgatgaatttttcagtgaaggttgtgcccctgggtctaagaaagactccagtctctgtaagctgtgtatgggctcaggcctaaacctgtgtgaacccaacaacaaagagggatactacggctacacaggcgctttcaggtgtctggttgagaagggagatgtggcctttgtgaaacaccagactgtcccacagaacactgggggaaaaaaccctgatccatgggctaagaatctgaatgaaaaagactatgagttgctgtgccttgatggtaccaggaaacctgtggaggagtatgcgaactgccacctggccagagccccgaatcacgctgtggtcacacggaaagataaggaagcttgcgtccacaagatattacgtcaacagcagcacctatttggaagcaacgtaactgactgctcgggcaacttttgtttgttccggtcggaaaccaaggaccttctgttcagagatgacacagtatgtttggccaaacttcatgacagaaacacatatgaaaaatacttaggagaagaatatgtcaaggctgttggtaacctgagaaaatgctccacctcatcactcctggaagcctgcactttccgtagaccttaaaatctcagaggtagggctgccaccaaggtgaagatgggaacgcagatgatccatgagtttgccctggtttcactggcccaagtggtttgtgctaaccacgtctgtcttcacagctctgtgttgccatgtgtgctgaacaaaaaataaaaattattattgattttatatttcaaaaactccattctttcctaaatattttcaacaaaggatttctttatgcattctgcctaaatacctatgcaactgagcccttccttctcagctcaagattcgtctggtctttccctacagctttgtgtgtgccatggccacatctcctgggtacagttcaaggagacatcttttctaaaagggtctgcgtgatcattaaaatataatcaaatgtaaaaaaaaaaaaaaaaaa

SEQ ID NO: 24 - DNA, 833 bp, Homo sapiens
ccgagctcggagccccgcgggccgcgcccgccgccggccccacccatccgggtcgaggaggccgaggccatggctgagacggaggagcggagcctggacaacttctttgccaagagggacaagaagaagaagaaggagcggagcaaccgggcggcgagtgccgcgggcgcagcgggcagcgccggcggaagcagtggagccgcgggtgcggcgggcggcggggcgggcgcggggacccggccgggtgacggcgggaccgccagcgcgggggctgcgggcccaggggccgccaccaaggctgtgacgaaggacgaagatgaatggaaagaattggagcaaaaagaggttgattacagcggcctcagggttcaggcaatgcaaataagcagtgaaaaggaagaagacgataatgaaaagagacaagatccaggtgataactgggaagaaggtggaggtggtggtggaggtatggaaaaatcttcaggtccctggaataaaacagctccagtacaagcacctcctgctccagtaattgttacagaaaccccagaaccagcgatgactagtggtgtgtataggcctcctggggccaggttaaccacaacaaggaaaacaccacaaggaccaccagaaatctacagtgatacacagttcccatccctgcagtcaactgccaagcatgtagaaagccggaacaggtacttaaaatgaatgctacctggaattaaatgactacatatggcacatctacatcttactttagggacatgaattttttaaaataaataaaatgggaagaaatgtaaaaaaaaaaaaaaaaaaaaaaaaaaaaa

SEQ ID NO: 25 - DNA, 5395 bp, Homo sapiens
acgcgcgcagccagcccttccccctccggctcccgcaccgccggccgcctcccctcgccctcctactctcccctccctgctccttcgctttttcctcctcctcctctcccggccccggctgccagcaccatgtccgcagggggagattttgggaatccactgagaaaattcaagttggtgttcttgggggagcagagcgtcgggaagacgtctctgattacgaggttcatgtacgacagcttcgacaacacataccaggcaaccattgggattgacttcttgtcaaaaaccatgtacttggaggaccgcacggtgcgactgcagctctgggacacagctggtcaggagaggttccgcagcctgatccccagctacatccgggactccacggtggctgtggtggtgtacgacatcacaaatctcaactccttccaacagacctctaagtggatcgacgacgtcaggacagagaggggcagtgatgttatcatcatgctggcgggcaacaagacggacctggctgataagaggcagataaccatcgaggagggggagcagcgcgccaaagaactgagcgtcatgttcattgagaccagtgcgaagactggctacaacgtgaagcagctttttcgacgtgtggcgtcggctctacccggaatggagaatgtccaggagaaaagcaaagaagggatgatcgacatcaagctggacaaaccccaggagcccccggccagcgagggcggctgctcctgctaatgcagagccgacctgtggcttcccatgacactccttgcttgttgtgttgcttcctattggctagcttcctaaggggggagggaaccgagttatcaagatgggaggatttttcttttctctctgtctttaggtgtagggtgggatggggagggaggctggacatcagggatcacatcactcttaacggctgttacttaaacaactattttttggtttggttgtaatatattgtactttattaagattgccaaaaactgttaaaatttaaaaaaaatttaaatcatgtgtatacaattttttgccagataaaaatgtagtcatttttatttgaaagatgtgctttttgtttttgtatatttgtaaacttatagagaaccttttccacacacctcctccttcctgttctctttgaaccattcatcacctctgccttcctcctatccccagcccaataaattaaaacaattaactgagcaaattaattaggcttcagtctggggccatctggccccactctctaggccctactccagttaaatcaaacattggttgaacacatcagcctctgaaaaggtagctctgactcttgtctttccatggccagagtgggtcgtcaacctcgtgtggagctgagaccaaggtctgtgggctctaggcagcccggcagcagcccccagaggaactgctcccacctctccttctctttccctgaaaagccttgaagggggttgagggtacaggcaaccttgtgttctctgtgccctcagggactggcagagcaagaggccatcagaaggacgaggtgctgttggcaattgcagctgcgtggtgcgtggtttatagactggggtgccatgtgtacttctgaaaatattttaaccagcccacccagcagtcagtacacatgcctgggccaagtctaagaaactcagtgtgtgatgttgggcagtgtgccatcctgaagccttcctcctggatgtcagggaagctggaccacctggagttgatcctctgtgatggggaggcgggggggggggggggtgttgtctgcagaaccaccaccttgaaagatccatgttcttagagcctcagctgctaatattgttgagtgctttctggaaaagctgatttgttgctatgttttcaccccagtggcatggcgcagttgaagtctttgtggacatatctttgtggctactgtggctgcgctgtggtcacctgaggatgtggttcaggtggggtctccagaaggctgcttgcccccagagagccatctcttccatttttgattcattcctgagaatggcttagtcctgagaatctgcaaagtctctgaagagaactctctcttcccactaagtgagtctggccaaaatgtaaaccccaccctccctgctgtcattggctctccctccaggctgctgctgggcatgtcatagatgggatgaatgaccatctggggtatggtgggctgaactccacaaggtcgttggaatgaattttgaaacttctcagaaattaatctgaaatggcaggcagtaagtgcagcagaatctggcaggactgatatttgtgcagtgggcctgccacacaccctctgcctaggaggctgtgtgccagagctcatctctagcaaggaatttatcttcaggtgaagaagagaggaagcaggatcccactgagcacctcttgcagaaggcaaggaccaatgtttgaacgtgtttcagatgtcatgtgtttagtttttatatgtgtgtacataattatatatagagatagacttgtgtatacaccttccacaaacacatcctcacggagatacatgtgctcaatgtatattcttgtttctcctgctctcaagttggaacttgcattgtgataagttttggaaattcaaaagtactgcaacgtgttgaaataagaaatacttaatattgtcaaataacttgtgattgtcttgccatcaataaaataatgcatagttgtgttaaactacaggcaaacatagcccacgggaatatctccaccatttctctatgtactttatatgcacgggtgtgcatgcctgtgtgggccagtgtccccccaccatgggcacacccccaagtggtgcttgttggaagagtgcttacttacctcgagagaatttacaggagtccacatgacagtgtcctgcctggttggcagcgggggccatcacctgtggcctctgagaccgccccatttacaggaatctgcactgggtctcagtgaatgaacgtatggtagatttttattttcttggcactaaagattagcttttttaaaaaaacatcccataaaacagtagaaactcagttcccttctcaggggcacacacatccaaggcaccgtggactgtgtttccatcctggcctagaggagcagtaaaagatagcatttggtttgacatggccttagtgagtcctgcctttcctagcatgcacacaacatcctctctttgagtttgggttctccccagccccttggcctctgaggctgagggtggcttcctcccatcctcccatctcagtggttccatggcgctcccttcggcacgtgcggtttccgcccctcccttcctggggtgtggaaaggcagccagacctctttttcagaagttgttggttccctgatttttgtcttgagcaggcaccatccctgtccccttgcttgcaggtagaattggcacagagttaaggttccataataaactgttaggtgctcttgaagaagatgtcatggcattgcctcagcaccccagcaagagcattgcatctttgctgaatccagatgggttagcagagggcaaattggaggattcctttgaggaaatgttctcaattgagcaattcagtccctctccccaaagactagacgtgacctggcagattagcaggatcctcttggccttcttttttggggatggtgggagtgaagggggtgaatcttaaaagcttatcaacaaagctcctgttctgcaggcatcaggaaagttgagtgtaagatggaaaaagcaaacagcctatttacaagtggaaacacattggttctgatcactcctaacttgctgggtgatcatacatacatcaacatgaaggtgtgacatcagaatcatgagcaccatggctgcagttgtgtgatccaaggctagttggcttggtagctgttggcagcagtttcccttggtcagaggcctccttgctatctatcgctgctctcttcttgtcatccttaaacattcagtcatgttcccaggtctgaggggagcaatggccagaccagtttcagtatctctggcaacagaaacaaggattgaaatggtggtagttaagagtgcagacacatctggggtgcaacgtctgcatcatcctggtggctagccagtgcggggaggccctgccctgggataccagttgtgacaataaagggatggccctcctggcttcagcatcctgcaggtagagcagcctcattccttcacaagatggaaggcaggtgaggatgtcaggatgagatgggaccaggtagccgaggacagtgaggcatgtctgagccacttgaggggcagctgaacagaaggatgtctgtgtgcatcaaccgagcagattgtgcgcacactcgtttccgaactgcctctccccaaagaatgtgaggcattgtcaccttgttacagctatgtgaagcagagctgtcacaacttttcctgtctacaggcaggaaaaccaggatggagaagggcaacttgcttattaagatcacccagcaagttaggagtgatcagaaccagtgaagtttccatttttcatccattgctgccctgtgtgtgaacaaatgtgactccatatttattacacagcaaggactgctgtgtgtgggtgtgttcctcagaccatctctactctttttggttaggacactaggttcttcccagcatatgagtgagaatattggtggtattttgggctcctctactgcacaagggccagtccccaagtctactctgattgattgtcatgggcacccacacagatcaggacaccctttgaatttttgtttgacatgaactatttaggtgttccaaaaccttgggatctcaatgtgcaaactccttggactccagacccctgtctggttggcactcccagcagtgtgtggtttcatcaggaaatccttgcagcaggggtttagatggttccttcaggaggtgggaagcctccatagcattgaaggccagcctgcatctcgcggtgtgtgtccacttctcccctcactttcccctcacccatccctttaaagtgattggctgtgaggagcacagagggtggcaattccatctgttatgggctcagaagacatagccgccatgttgatttcacattaaactgtgtaaaatgtggaaaagactcagcatgttggtcaaacaataaactgtcctaattctcaaaaaaaaaaaaaaaaaaaaaaaaaaaaaaaaaaaaaaaaaaaaaaaaaaaaaaaaaaaaaaaaaaaaaaaaaaaaaaaaaaaaaaaaaaaaaaaaaaaaaaaaaaaaaaaaaaaaaaaaaaaaaaaaaaaaaaaaaaaaaaaaaaaaaaaaaaaaaaaaaaaaaaaaaaaaaaaa

SEQ ID NO: 26 - DNA, 20 bp, Artificial Sequence
  Chemically synthesized primer
catgaatctggcatggtgtc

SEQ ID NO: 27 - DNA, 20 bp, Artificial Sequence
  Chemically synthesized primer
atgctctcaagctgggaaaa

SEQ ID NO: 28 - DNA, 19 bp, Artificial Sequence
  Chemically synthesized primer
ttgacccagagctcggagc

SEQ ID NO: 29 - DNA, 19 bp, Artificial Sequence
  Chemically synthesized primer
tccggacctagcaccagag

SEQ ID NO: 30 - DNA, 23 bp, Artificial Sequence
  Chemically synthesized primer
tgaaaaggaagatgatgataatg

SEQ ID NO: 31 - DNA, 21 bp, Artificial Sequence
  Chemically synthesized primer
tctgctgagaatgtaagcttc

SEQ ID NO: 32 - DNA, 20 bp, Artificial Sequence
  Chemically synthesized primer
catttcctgttcctctggcc

SEQ ID NO: 33 - DNA, 20 bp, Artificial Sequence
  Chemically synthesized primer
tgaggttagtagccaggcac

SEQ ID NO: 34 - DNA, 19 bp, Artificial Sequence
  Chemically synthesized primer
cccaacctgacagcaccag

SEQ ID NO: 35 - DNA, 19 bp, Artificial Sequence
  Chemically synthesized primer
gtacctgctcctgactgcc

SEQ ID NO: 36 - DNA, 20 bp, Artificial Sequence
  Chemically synthesized primer
ttcagtggtaggggaagtgg

SEQ ID NO: 37 - DNA, 22 bp, Artificial Sequence
  Chemically synthesized primer
atttgcatgctttagattgggg

SEQ ID NO: 38 - DNA, 19 bp, Artificial Sequence
  Chemically synthesized primer
gggatcccatgccctcttc

SEQ ID NO: 39 - DNA, 21 bp, Artificial Sequence
  Chemically synthesized primer
ggagcatgctactaacatgtg

SEQ ID NO: 40 - DNA, 20 bp, Artificial Sequence
  Chemically synthesized primer
cattggttgtgagcctagcc

SEQ ID NO: 41 - DNA, 23 bp, Artificial Sequence
  Chemically synthesized primer
ttctgaaattagtaccactgtag

SEQ ID NO: 42 - DNA, 19 bp, Artificial Sequence
  Chemically synthesized primer
cgggagccatgcagcccac

SEQ ID NO: 43 - DNA, 19 bp, Artificial Sequence
  Chemically synthesized primer
aacgcttggccaccctcgg

SEQ ID NO: 44 - DNA, 20 bp, Artificial Sequence
  Chemically synthesized primer
accacatggtggctcagaac

SEQ ID NO: 45 - DNA, 22 bp, Artificial Sequence
  Chemically synthesized primer
ctaattgtcctagctagcttac

SEQ ID NO: 46 - DNA, 19 bp, Artificial Sequence
  Chemically synthesized primer
gggcatttctgagttcaag

SEQ ID NO: 47 - DNA, 23 bp, Artificial Sequence
  Chemically synthesized primer
cagggatataattgaaaggtatg

SEQ ID NO: 48 - DNA, 22 bp, Artificial Sequence
  Chemically synthesized primer
aagacagctacagtgtactcat

SEQ ID NO: 49 - DNA, 23 bp, Artificial Sequence
  Chemically synthesized primer
tatcatgaatagtgtcaagcagt

SEQ ID NO: 50 - DNA, 21 bp, Artificial Sequence
  Chemically synthesized primer
ttcgcggtggagaattatctc

SEQ ID NO: 51 - DNA, 22 bp, Artificial Sequence
  Chemically synthesized primer
tggaataaaccctccttgtttg

SEQ ID NO: 52 - DNA, 21 bp, Artificial Sequence
  Chemically synthesized primer
ttttgagacagactccctggt

SEQ ID NO: 53 - DNA, 19 bp, Artificial Sequence
  Chemically synthesized primer
cagcggaagctggcctaca

SEQ ID NO: 54 - DNA, 20 bp, Artificial Sequence
  Chemically synthesized primer
ggttggttctcagtgcctac

SEQ ID NO: 55 - DNA, 21 bp, Artificial Sequence
  Chemically synthesized primer
atctgcctgcctctctctatt

SEQ ID NO: 56 - DNA, 20 bp, Artificial Sequence
  Chemically synthesized primer
tgtgggaagccacagaactc

SEQ ID NO: 57 - DNA, 19 bp, Artificial Sequence
  Chemically synthesized primer
ctaacctcccgctggaacc

SEQ ID NO: 58 - DNA, 22 bp, Artificial Sequence
  Chemically synthesized primer
ctccaacacatctttctcaact

SEQ ID NO: 59 - DNA, 21 bp, Artificial Sequence
  Chemically synthesized primer
acttcacactcatcagcacag

SEQ ID NO: 60 - DNA, 20 bp, Artificial Sequence
  61
cagggctacacagagaaacc

SEQ ID NO: 61 - DNA, 21 bp, Artificial Sequence
  Chemically synthesized primer
agtggccttctgagtgattag

SEQ ID NO: 62 - DNA, 23 bp, Artificial Sequence
  Chemically synthesized primer
atcctagcaagtatttatctctc

SEQ ID NO: 63 - DNA, 18 bp, Artificial Sequence
  Chemically synthesized primer
ccagcactcgggaggcag

SEQ ID NO: 64 - DNA, 21 bp, Artificial Sequence
  Chemically synthesized primer
catgcaggggatttgtcaatg

SEQ ID NO: 65 - DNA, 21 bp, Artificial Sequence
  Chemically synthesized primer
ctggtgtgtctgaaaagagtg

SEQ ID NO: 66 - DNA, 22 bp, Artificial Sequence
  Chemically synthesized primer
aatgctgtaaatgcaagccttc

SEQ ID NO: 67 - DNA, 21 bp, Artificial Sequence
  Chemically synthesized primer
tacacagagaaaccctgtctc

SEQ ID NO: 68 - DNA, 18 bp, Artificial Sequence
  Chemically synthesized primer
acatgcgtgcgcgccctc

SEQ ID NO: 69 - DNA, 18 bp, Artificial Sequence
  Chemically synthesized primer
ctaaggagcggccacccg

SEQ ID NO: 70 - DNA, 21 bp, Artificial Sequence
  Chemically synthesized primer
agctcttgtctctagctgcgt

SEQ ID NO: 71 - DNA, 21 bp, Artificial Sequence
  Chemically synthesized primer
gatgctataccctcatacagg

SEQ ID NO: 72 - DNA, 20 bp, Artificial Sequence
  Chemically synthesized primer
tttgtagaagccccgctcac

SEQ ID NO: 73 - DNA, 20 bp, Artificial Sequence
  Chemically synthesized primer
tcctcggcttgcttccatca

SEQ ID NO: 74 - DNA, 19 bp, Artificial Sequence
  Chemically synthesized primer
gccctggatgtcctggaac

SEQ ID NO: 75 - DNA, 21 bp, Artificial Sequence
  Chemically synthesized primer
accacctagtatactgcagac

SEQ ID NO: 76 - DNA, 21 bp, Artificial Sequence
  Chemically synthesized primer
tagaagtgtgtcacaccacag

SEQ ID NO: 77 - DNA, 20 bp, Artificial Sequence
  Chemically synthesized primer
gctagggatgtcactcagtg

SEQ ID NO: 78 - DNA, 22 bp, Artificial Sequence
  Chemically synthesized primer
accaagagaatgtcagtgtaag

SEQ ID NO: 79 - DNA, 21 bp, Artificial Sequence
  '
cttgttagaggagtgtgtcac

SEQ ID NO: 80 - DNA, 21 bp, Artificial Sequence
  Chemically synthesized primer
ctgtgatacccagatgttttg

SEQ ID NO: 81 - DNA, 23 bp, Artificial Sequence
  Chemically synthesized primer
cccacaatacttatagattatag

SEQ ID NO: 82 - DNA, 21 bp, Artificial Sequence
  Chemically synthesized primer
cactgctcatctacacaaagc

SEQ ID NO: 83 - DNA, 20 bp, Artificial Sequence
  Chemically synthesized primer
ccaacagctatctgtacagc

SEQ ID NO: 84 - DNA, 21 bp, Artificial Sequence
  Chemically synthesized primer
atctgtaagagtccagagcag

SEQ ID NO: 85 - DNA, 20 bp, Artificial Sequence
  Chemically synthesized primer
gttgctagtatctgtcaccc

SEQ ID NO: 86 - DNA, 22 bp, Artificial Sequence
  Chemically synthesized primer
tgtgaatggaagtccaaggatc

SEQ ID NO: 87 - DNA, 20 bp, Artificial Sequence
  Chemically synthesized primer
tgggagtgctgtcctcagtt

SEQ ID NO: 88 - DNA, 20 bp, Artificial Sequence
  Chemically synthesized primer
cagaaggtagcgccttcttg

SEQ ID NO: 89 - DNA, 21 bp, Artificial Sequence
  Chemically synthesized primer
ctcctgggcttcttacagttc

SEQ ID NO: 90 - DNA, 20 bp, Artificial Sequence
  Chemically synthesized primer
gcctcaccactatcgagaag

SEQ ID NO: 91 - DNA, 21 bp, Artificial Sequence
  Chemically synthesized primer
atctgtaactccagttccagg

SEQ ID NO: 92 - DNA, 20 bp, Artificial Sequence
  Chemically synthesized primer
agccttgggtgagcaaatgg

SEQ ID NO: 93 - DNA, 20 bp, Artificial Sequence
  Chemically synthesized primer
gctgtcctagaactcactct

SEQ ID NO: 94 - DNA, 19 bp, Artificial Sequence
  Chemically synthesized primer
agagttcgagaccagcctg

SEQ ID NO: 95 - DNA, 19 bp, Artificial Sequence
  Chemically synthesized primer
tctgctggctgcttccttg

SEQ ID NO: 96 - DNA, 19 bp, Artificial Sequence
  Chemically synthesized primer
agggcagagcaagacgctc

SEQ ID NO: 97 - DNA, 19 bp, Artificial Sequence
  Chemically synthesized primer
tgcggacatggtgctggca

SEQ ID NO: 98 - DNA, 19 bp, Artificial Sequence
  Chemically synthesized primer
gggaggaccaagggggaaa

SEQ ID NO: 99 - DNA, 19 bp, Artificial Sequence
  Chemically synthesized primer
ttggggtgggggcaaccag

SEQ ID NO: 100 - DNA, 21 bp, Artificial Sequence
  Chemically synthesized primer
tctgatacctgtgggaaggag

SEQ ID NO: 101 - DNA, 19 bp, Artificial Sequence
  Chemically synthesized primer
catagctgcacggtgcctg

SEQ ID NO: 102 - DNA, 23 bp, Artificial Sequence
  Chemically synthesized primer
gagcacatacaaactatcacaag

SEQ ID NO: 103 - DNA, 20 bp, Artificial Sequence
  Chemically synthesized primer
tgtccctcatgggaacagtg

SEQ ID NO: 104 - DNA, 23 bp, Artificial Sequence
  Chemically synthesized primer
gactgtcagcaaagctgctggtg

SEQ ID NO: 105 - DNA, 18 bp, Artificial Sequence
  Chemically synthesized primer
gctccagcagatccaagc

SEQ ID NO: 106 - DNA, 21 bp, Artificial Sequence
  Chemically synthesized primer
aactcctccacggctacattt

SEQ ID NO: 107 - DNA, 20 bp, Artificial Sequence
  Chemically synthesized primer
accaggatgacacttgggtg

SEQ ID NO: 108 - DNA, 21 bp, Artificial Sequence
  Chemically synthesized primer
ctgcactcagaagacactaag

SEQ ID NO: 109 - DNA, 20 bp, Artificial Sequence
  Chemically synthesized primer
ggcaggaacggaagcagagg

SEQ ID NO: 110 - DNA, 20 bp, Artificial Sequence
  Chemically synthesized primer
gtggctcatgcctttaatcc

SEQ ID NO: 111 - DNA, 21 bp, Artificial Sequence
  Chemically synthesized primer
cacaactgtctgtaactccag

SEQ ID NO: 112 - DNA, 19 bp, Artificial Sequence
  Chemically synthesized primer
tgtgtgccctgtgcggatg

SEQ ID NO: 113 - DNA, 20 bp, Artificial Sequence
  Chemically synthesized primer
ttttgtgagactaggccggg

SEQ ID NO: 114 - DNA, 21 bp, Artificial Sequence
  Chemically synthesized primer
aagtgcttctaaagctggcca

SEQ ID NO: 115 - DNA, 20 bp, Artificial Sequence
  Chemically synthesized primer
agatggctcagcggttaaga

SEQ ID NO: 116 - DNA, 22 bp, Artificial Sequence
  Chemically synthesized primer
ctaattgtcctagctagcttag

SEQ ID NO: 117 - DNA, 22 bp, Artificial Sequence
  Chemically synthesized primer
ctaattgtcctagctagcttag

SEQ ID NO: 118 - DNA, 20 bp, Artificial Sequence
  Chemically synthesized primer
aagccagccttgaggaagac

SEQ ID NO: 119 - DNA, 22 bp, Artificial Sequence
  Chemically synthesized primer
tgtgtgcatttttacagccact

SEQ ID NO: 120 - DNA, 20 bp, Artificial Sequence
  Chemically synthesized primer
aagccagccttgaggaagac

SEQ ID NO: 121 - DNA, 22 bp, Artificial Sequence
  Chemically synthesized primer
tgtgtgcatttttacagccact

SEQ ID NO: 122 - DNA, 19 bp, Artificial Sequence
  Chemically synthesized primer
ctaacctcccgctggaagg

SEQ ID NO: 123 - DNA, 20 bp, Artificial Sequence
  Chemically synthesized primer
tgactgtgctgcacttggat

SEQ ID NO: 124 - DNA, 20 bp, Artificial Sequence
  Chemically synthesized primer
tttcagcctggcaaacaacg

SEQ ID NO: 125 - DNA, 20 bp, Artificial Sequence
  Chemically synthesized primer
cgctaaccagaaagcaagcg

SEQ ID NO: 126 - DNA, 20 bp, Artificial Sequence
  Chemically synthesized primer
ccccgctcacagtgtcataa

SEQ ID NO: 127 - DNA, 20 bp, Artificial Sequence
  Chemically synthesized primer
atccttcctcggcttgcttc

SEQ ID NO: 128 - DNA, 20 bp, Artificial Sequence
  Chemically synthesized primer
ctcagagcacctcagagcac

SEQ ID NO: 129 - DNA, 20 bp, Artificial Sequence
  Chemically synthesized primer
gcagtgacaagtccctcctc

SEQ ID NO: 130 - DNA, 20 bp, Artificial Sequence
  Chemically synthesized primer
cttcaagagcagcctcacca

SEQ ID NO: 131 - DNA, 20 bp, Artificial Sequence
  Chemically synthesized primer
ggtttgtttccttgccgtcc

SEQ ID NO: 132 - DNA, 20 bp, Artificial Sequence
  Chemically synthesized primer
cagcctatgatgggagccac

SEQ ID NO: 133 - DNA, 20 bp, Artificial Sequence
  Chemically synthesized primer
cccaaggcttgccctaactt

SEQ ID NO: 134 - DNA, 20 bp, Artificial Sequence
  Chemically synthesized primer
gtgggtgggtgagacagaag

SEQ ID NO: 135 - DNA, 20 bp, Artificial Sequence
  Chemically synthesized primer
ttcccaaaatctccccctgc

SEQ ID NO: 136 - DNA, 20 bp, Artificial Sequence
  Chemically synthesized primer
ctgctaaccactggctctgt

SEQ ID NO: 137 - DNA, 20 bp, Artificial Sequence
  Chemically synthesized primer
gagctagctgtagggcagtg

SEQ ID NO: 138 - DNA, 20 bp, Artificial Sequence
  Chemically synthesized primer
tgttgaaccaccatccctgg

SEQ ID NO: 139 - DNA, 20 bp, Artificial Sequence
  Chemically synthesized primer
atgcccaaggtctccaagtg

SEQ ID NO: 140 - DNA, 20 bp, Artificial Sequence
  Chemically synthesized primer
ctcccagtgaacaccagcat

SEQ ID NO: 141 - DNA, 20 bp, Artificial Sequence
  Chemically synthesized primer
tggaaagatgttccccagcc

SEQ ID NO: 142 - DNA, 21 bp, Artificial Sequence
  Chemically synthesized primer
tgccttgaacagtggaacatg

SEQ ID NO: 143 - DNA, 20 bp, Artificial Sequence
  Chemically synthesized primer
ccatccctctctcacttgag

SEQ ID NO: 144 - DNA, 23 bp, Artificial Sequence
  Chemically synthesized primer
tagagtgtaggttagtactctta

SEQ ID NO: 145 - DNA, 22 bp, Artificial Sequence
  Chemically synthesized primer
agcacttgccataagcattaga

SEQ ID NO: 146 - DNA, 22 bp, Artificial Sequence
  Chemically synthesized primer
tctaatgcttatggcaagtgct

SEQ ID NO: 147 - DNA, 20 bp, Artificial Sequence
  Chemically synthesized primer
acagaggactcaaggtcagc

SEQ ID NO: 148 - DNA, 22 bp, Artificial Sequence
  Chemically synthesized primer
atccacaagcactgtacaaaca

SEQ ID NO: 149 - DNA, 21 bp, Artificial Sequence
  Chemically synthesized primer
atacgtaggcaaagctgatcg

SEQ ID NO: 150 - DNA, 21 bp, Artificial Sequence
  Chemically synthesized primer
cgatcagctttgcctacgtat

SEQ ID NO: 151 - DNA, 19 bp, Artificial Sequence
  Chemically synthesized primer
ctgcccaccagctggaagt

SEQ ID NO: 152 - DNA, 22 bp, Artificial Sequence
  Chemically synthesized primer
caatgttaggaactgattgctc

SEQ ID NO: 153 - DNA, 21 bp, Artificial Sequence
  Chemically synthesized primer
acacctgcatacactgaagca

SEQ ID NO: 154 - DNA, 21 bp, Artificial Sequence
  Chemically synthesized primer
tgcttcagtgtatgcaggtgt

SEQ ID NO: 155 - DNA, 23 bp, Artificial Sequence
  Chemically synthesized primer
ttatagatcagacttggagatac

SEQ ID NO: 156 - DNA, 21 bp, Artificial Sequence
  Chemically synthesized primer
gtgagaacacctagggatatg

SEQ ID NO: 157 - DNA, 21 bp, Artificial Sequence
  Chemically synthesized primer
attccagcagctcaagttcag

SEQ ID NO: 158 - DNA, 21 bp, Artificial Sequence
  Chemically synthesized primer
ctgaacttgagctgctggaat

SEQ ID NO: 159 - DNA, 20 bp, Artificial Sequence
  Chemically synthesized primer
agcgagtgaactacaggagc

SEQ ID NO: 160 - DNA, 20 bp, Artificial Sequence
  Chemically synthesized primer
tcgccaggattcttgagtcg

SEQ ID NO: 161 - DNA, 20 bp, Artificial Sequence
  Chemically synthesized primer
tccggagacgtgcctaattc

SEQ ID NO: 162 - DNA, 20 bp, Artificial Sequence
  Chemically synthesized primer
gaattaggcacgtctccgga

SEQ ID NO: 163 - DNA, 20 bp, Artificial Sequence
  Chemically synthesized primer
caccttcgttatggccttgc

SEQ ID NO: 164 - DNA, 20 bp, Artificial Sequence
  Chemically synthesized primer
tgctctggtggtacgttcct

SEQ ID NO: 165 - DNA, 20 bp, Artificial Sequence
  Chemically synthesized primer
tcactagggacgtcactctc

SEQ ID NO: 166 - DNA, 21 bp, Artificial Sequence
  Chemically synthesized primer
gccagtgacttctcttagggg

SEQ ID NO: 167 - DNA, 20 bp, Artificial Sequence
  Chemically synthesized primer
gtgatcagcctaaggccctg

SEQ ID NO: 168 - DNA, 21 bp, Artificial Sequence
  Chemically synthesized primer
cgcgccttccttgtccctcag

SEQ ID NO: 169 - DNA, 20 bp, Artificial Sequence
  Chemically synthesized primer
ggctcaagcgggaccacgag

SEQ ID NO: 170 - DNA, 19 bp, Artificial Sequence
  Chemically synthesized primer
tgctccacgctcgcggttc

SEQ ID NO: 171 - DNA, 20 bp, Artificial Sequence
  Chemically synthesized primer
cgtggccgtggttgggagag

SEQ ID NO: 172 - DNA, 20 bp, Artificial Sequence
  Chemically synthesized primer
cttcagccaagtcaccaacc

SEQ ID NO: 173 - DNA, 19 bp, Artificial Sequence
  Chemically synthesized primer
tccggacctagcaccagag

SEQ ID NO: 174 - DNA, 20 bp, Artificial Sequence
  Chemically synthesized primer
cgtagaaggaacggattgtc

SEQ ID NO: 175 - DNA, 20 bp, Artificial Sequence
  Chemically synthesized primer
ggaccctcaccttcgttatg

SEQ ID NO: 176 - DNA, 20 bp, Artificial Sequence
  Chemically synthesized primer
cttcagccaagtcaccaacc

SEQ ID NO: 177 - DNA, 20 bp, Artificial Sequence
  Chemically synthesized primer
ggaccctcaccttcgttatg

SEQ ID NO: 178 - DNA, 20 bp, Artificial Sequence
  Chemically synthesized primer
cgtagaaggaacggattgtc

SEQ ID NO: 179 - DNA, 19 bp, Artificial Sequence
  Chemically synthesized primer
tccggacctagcaccagag

SEQ ID NO: 180 - DNA, 19 bp, Artificial Sequence
  Chemically synthesized primer
acgtaccaccagagcacgg

SEQ ID NO: 181 - DNA, 17 bp, Artificial Sequence
  Chemically synthesized primer
acaggccgaggggagtt

SEQ ID NO: 182 - DNA, 20 bp, Artificial Sequence
  Chemically synthesized primer
ctcttggtgacgacaccctc

SEQ ID NO: 183 - DNA, 20 bp, Artificial Sequence
  Chemically synthesized primer
ggtgcccattcagccatttg

SEQ ID NO: 184 - DNA, 20 bp, Artificial Sequence
  Chemically synthesized primer
cactgtagccgtgtccactc

SEQ ID NO: 185 - DNA, 20 bp, Artificial Sequence
  Chemically synthesized primer
cgggacatctcggccaataa

SEQ ID NO: 186 - DNA, 20 bp, Artificial Sequence
  Chemically synthesized primer
tcagttggaagcctgttccc

SEQ ID NO: 187 - DNA, 23 bp, Artificial Sequence
  Chemically synthesized primer
aggtcaaccaagcatgaaaagag

SEQ ID NO: 188 - DNA, 20 bp, Artificial Sequence
  Chemically synthesized primer
ctcctggcctagtggcaatg

SEQ ID NO: 189 - DNA, 20 bp, Artificial Sequence
  Chemically synthesized primer
caacctcacccgagataccc

SEQ ID NO: 190 - DNA, 20 bp, Artificial Sequence
  Chemically synthesized primer
ttacgtggctctaggctcca

SEQ ID NO: 191 - DNA, 20 bp, Artificial Sequence
  Chemically synthesized primer
cccattatctccaccgtccg

SEQ ID NO: 192 - DNA, 20 bp, Artificial Sequence
  Chemically synthesized primer
ccaccccttccgtgtatgac

SEQ ID NO: 193 - DNA, 20 bp, Artificial Sequence
  Chemically synthesized primer
tgcagcaggaaacgagctta

SEQ ID NO: 194 - DNA, 20 bp, Artificial Sequence
  Chemically synthesized primer
aattcccggacggcttcatt

SEQ ID NO: 195 - DNA, 20 bp, Artificial Sequence
  Chemically synthesized primer
atggagctgaagaaggacag

SEQ ID NO: 196 - DNA, 19 bp, Artificial Sequence
  Chemically synthesized primer
gctgcggctaactgtggtg

SEQ ID NO: 197 - DNA, 20 bp, Artificial Sequence
  Chemically synthesized primer
gcctgacaagatcaaagctg

SEQ ID NO: 198 - DNA, 20 bp, Artificial Sequence
  Chemically synthesized primer
attgtctaggcaggtgtgtg

SEQ ID NO: 199 - DNA, 20 bp, Artificial Sequence
  Chemically synthesized primer
gcaatgtgaagtctctgggc

SEQ ID NO: 200 - DNA, 21 bp, Artificial Sequence
  Chemically synthesized primer
tacaggtatcctgtgcgtgga

SEQ ID NO: 201 - DNA, 20 bp, Artificial Sequence
  Chemically synthesized primer
tgcttggtcttgatgcagag

SEQ ID NO: 202 - DNA, 19 bp, Artificial Sequence
  Chemically synthesized primer
ccagctgccagcaccatgt

SEQ ID NO: 203 - DNA, 20 bp, Artificial Sequence
  Chemically synthesized primer
ctttcatggcttcggcgaac

SEQ ID NO: 204 - DNA, 19 bp, Artificial Sequence
  Chemically synthesized primer
gaagcgggtcggtctgtac

SEQ ID NO: 205 - DNA, 19 bp, Artificial Sequence
  Chemically synthesized primer
gcagaacgcagttccacag

SEQ ID NO: 206 - DNA, 19 bp, Artificial Sequence
  Chemically synthesized primer
tccacatggaggcaagcag

SEQ ID NO: 207 - DNA, 19 bp, Artificial Sequence
  Chemically synthesized primer
ctcgggctccacctagttc

SEQ ID NO: 208 - DNA, 22 bp, Artificial Sequence
  Chemically synthesized primer
tgccatatctgtcaccccattg

SEQ ID NO: 209 - DNA, 20 bp, Artificial Sequence
  Chemically synthesized primer
tcaagctcctggcctagtgg

SEQ ID NO: 210 - DNA, 20 bp, Artificial Sequence
  Chemically synthesized primer
tccctagaggtgtgacaggc

SEQ ID NO: 211 - DNA, 23 bp, Artificial Sequence
  Chemically synthesized primer
gttcataggtcagaacaccaagc

SEQ ID NO: 212 - DNA, 20 bp, Artificial Sequence
  Chemically synthesized primer
cagaagcgggtcggtctgta

SEQ ID NO: 213 - DNA, 20 bp, Artificial Sequence
  Chemically synthesized primer
gtccacccttggcactacac

SEQ ID NO: 214 - DNA, 21 bp, Artificial Sequence
  Chemically synthesized primer
ctggattgcttgctgctcttc

SEQ ID NO: 215 - DNA, 21 bp, Artificial Sequence
  Chemically synthesized primer
aaacccagacatgcttctgct

SEQ ID NO: 216 - DNA, 20 bp, Artificial Sequence
  Chemically synthesized primer
aagcctgaagcacccaagtc

SEQ ID NO: 217 - DNA, 20 bp, Artificial Sequence
  Chemically synthesized primer
caataacaggggtaacagcc

SEQ ID NO: 218 - DNA, 19 bp, Artificial Sequence
  Chemically synthesized primer
gcacactggacagttccag

SEQ ID NO: 219 - DNA, 20 bp, Artificial Sequence
  Chemically synthesized primer
accctgcagtttgagaaagg

SEQ ID NO: 220 - DNA, 19 bp, Artificial Sequence
  Chemically synthesized primer
ctcggtgaccatcccacac

SEQ ID NO: 221 - DNA, 20 bp, Artificial Sequence
  Chemically synthesized primer
ggctgttacccctgttatgg

SEQ ID NO: 222 - DNA, 19 bp, Artificial Sequence
  Chemically synthesized primer
ctgtagaccttcacacccc

SEQ ID NO: 223 - DNA, 20 bp, Artificial Sequence
  Chemically synthesized primer
cactacactccaggaactcc

SEQ ID NO: 224 - DNA, 19 bp, Artificial Sequence
  Chemically synthesized primer
ttgacccagagctcggagc

SEQ ID NO: 225 - DNA, 24 bp, Artificial Sequence
  Chemically synthesized primer
tccattggtttactgtttattcaa

SEQ ID NO: 226 - DNA, 19 bp, Artificial Sequence
  Chemically synthesized primer
ttgacccagagctcggagc

SEQ ID NO: 227 - DNA, 24 bp, Artificial Sequence
  Chemically synthesized primer
ggtagtattcattttaagtacttc

SEQ ID NO: 228 - DNA, 23 bp, Artificial Sequence
  Chemically synthesized primer
ttgagttgtggaatttctgtcgc

SEQ ID NO: 229 - DNA, 24 bp, Artificial Sequence
  Chemically synthesized primer
tccattggtttactgtttattcaa

SEQ ID NO: 230 - DNA, 19 bp, Artificial Sequence
  Chemically synthesized primer
gacgcccacattgaagaac

SEQ ID NO: 231 - DNA, 24 bp, Artificial Sequence
  Chemically synthesized primer
agctattcacatgtaagtcggaaa

SEQ ID NO: 232 - DNA, 20 bp, Artificial Sequence
  Chemically synthesized primer
ggacagacctggccttacag

SEQ ID NO: 233 - DNA, 20 bp, Artificial Sequence
  Chemically synthesized primer
atttggcgacaggaaacatt

SEQ ID NO: 234 - DNA, 20 bp, Artificial Sequence
  Chemically synthesized primer
ctgcagccggaggcctgttg

SEQ ID NO: 235 - DNA, 20 bp, Artificial Sequence
  Chemically synthesized primer
aactgtggcagcaggggcag

SEQ ID NO: 236 - DNA, 23 bp, Artificial Sequence
  Chemically synthesized primer
gtgaatgaccagtgaggggctgc

SEQ ID NO: 237 - DNA, 20 bp, Artificial Sequence
  Chemically synthesized primer
caccaggcaggcatcgtggg

SEQ ID NO: 238 - DNA, 25 bp, Artificial Sequence
  Chemically synthesized primer
agcagtgcagagattgtgaaagggc

SEQ ID NO: 239 - DNA, 20 bp, Artificial Sequence
  Chemically synthesized primer
ggctcccagtgctgtggcaa

SEQ ID NO: 240 - DNA, 20 bp, Artificial Sequence
  Chemically synthesized primer
atagcccagccaatcaactg

SEQ ID NO: 241 - DNA, 20 bp, Artificial Sequence
  Chemically synthesized primer
caccccctagtccaaagtca

SEQ ID NO: 242 - DNA, 20 bp, Artificial Sequence
  Chemically synthesized primer
ccttcagctgggactactgc

SEQ ID NO: 243 - DNA, 20 bp, Artificial Sequence
  Chemically synthesized primer
cccaccactgaagtgttcct

SEQ ID NO: 244 - DNA, 20 bp, Artificial Sequence
  Chemically synthesized primer
aaagaaccctgccgaatggg

SEQ ID NO: 245 - DNA, 20 bp, Artificial Sequence
  Chemically synthesized primer
agcagcgaagactacaccag

SEQ ID NO: 246 - DNA, 20 bp, Artificial Sequence
  Chemically synthesized primer
gcatcgctttgagagtaggg

SEQ ID NO: 247 - DNA, 20 bp, Artificial Sequence
  Chemically synthesized primer
gctcctagagccaccttgtg

SEQ ID NO: 248 - DNA, 20 bp, Artificial Sequence
  Chemically synthesized primer
tgttaccaactgggacgaca

SEQ ID NO: 249 - DNA, 20 bp, Artibeus cinereus
aaggaaggctggaaaagagc

SEQ ID NO: 250 - DNA, 20 bp, Artificial Sequence
  Chemically synthesized primer
acaaccacccaacgaatgtt

SEQ ID NO: 251 - DNA, 20 bp, Artificial Sequence
  Chemically synthesized primer
caaagttttggtgcccaagt

SEQ ID NO: 252 - DNA, 20 bp, Artificial Sequence
  Chemically synthesized primer
catgaatctggcatggtgtc

SEQ ID NO: 253 - DNA, 20 bp, Artificial Sequence
  Chemically synthesized primer
atgctctcaagctgggaaaa

SEQ ID NO: 254 - DNA, 20 bp, Artificial Sequence
  Chemically synthesized primer
tggcaggccatcagaagaag

SEQ ID NO: 255 - DNA, 20 bp, Artificial Sequence
  Chemically synthesized primer
ccatgcagtagtggtcagca

SEQ ID NO: 256 - DNA, 20 bp, Artificial Sequence
  Chemically synthesized primer
atgtgaccagtggagtgctg

SEQ ID NO: 257 - DNA, 20 bp, Artificial Sequence
  Chemically synthesized primer
cagctccgactgaagaatgc

SEQ ID NO: 258 - DNA, 20 bp, Artificial Sequence
  Chemically synthesized primer
tggagcctagagccacgtaa

SEQ ID NO: 259 - DNA, 20 bp, Artificial Sequence
  Chemically synthesized primer
acatctttcacctcccgctg

SEQ ID NO: 260 - DNA, 26 bp, Artificial Sequence
  Chemically synthesized primer
gtgaaattggttatgtaaatgtctga

SEQ ID NO: 261 - DNA, 22 bp, Artificial Sequence
  Chemically synthesized primer
gagatgactagggtgaactggg

SEQ ID NO: 262 - DNA, 21 bp, Artificial Sequence
  Chemically synthesized primer
tccagactcctgggaactaca

SEQ ID NO: 263 - DNA, 19 bp, Artificial Sequence
  Chemically synthesized primer
tttcccagccagtaaaggc

SEQ ID NO: 264 - DNA, 27 bp, Artificial Sequence
  Chemically synthesized primer
cctaaggtaattaaatgtgtaagacca

SEQ ID NO: 265 - DNA, 25 bp, Artificial Sequence
  Chemically synthesized primer
ttctgtttcactatacatgtgcaca

SEQ ID NO: 266 - DNA, 20 bp, Artificial Sequence
  Chemically synthesized primer
ttgggactgtttggaatgtg

SEQ ID NO: 267 - DNA, 21 bp, Artificial Sequence
  Chemically synthesized primer
aattcataagtgtcccctggg

SEQ ID NO: 268 - DNA, 19 bp, Artificial Sequence
  Chemically synthesized primer
cctccacatgtgcactgct

SEQ ID NO: 269 - DNA, 26 bp, Artificial Sequence
  Chemically synthesized primer
ctgtccatctatcatctatctgtctg

SEQ ID NO: 270 - DNA, 23 bp, Artificial Sequence
  Chemically synthesized primer
agaattgccttctggtctataca

SEQ ID NO: 271 - DNA, 23 bp, Artificial Sequence
  Chemically synthesized primer
cgtgttaaacgtgaatatgtttg

SEQ ID NO: 272 - DNA, 24 bp, Artificial Sequence
  Chemically synthesized primer
taaatactgaggcagagtgacagc

SEQ ID NO: 273 - DNA, 20 bp, Artificial Sequence
  Chemically synthesized primer
gggagcattatcattcccaa

SEQ ID NO: 274 - DNA, 21 bp, Artificial Sequence
  Chemically synthesized primer
ctcattcacttcctggtcctg

SEQ ID NO: 275 - DNA, 20 bp, Artificial Sequence
  Chemically synthesized primer
gaaggaaagcccacactttg

SEQ ID NO: 276 - DNA, 20 bp, Artificial Sequence
  Chemically synthesized primer
ccagcgcactgttctgataa

SEQ ID NO: 277 - DNA, 20 bp, Artificial Sequence
  Chemically synthesized primer
aggtgccttctgctttgaaa

SEQ ID NO: 278 - DNA, 21 bp, Artificial Sequence
  Chemically synthesized primer
atgttaaaacatgggctggtg

SEQ ID NO: 279 - DNA, 24 bp, Artificial Sequence
  Chemically synthesized primer
tgctttcttgttatttcatctacg

SEQ ID NO: 280 - DNA, 27 bp, Artificial Sequence
  Chemically synthesized primer
aatttttaaagtctctctcctctttcg

SEQ ID NO: 281 - DNA, 23 bp, Artificial Sequence
  Chemically synthesized primer
cctctgtttcatccttgtactgc

SEQ ID NO: 282 - DNA, 20 bp, Artificial Sequence
  Chemically synthesized primer
gacctatgacagcaagggga

SEQ ID NO: 283 - DNA, 22 bp, Artificial Sequence
  Chemically synthesized primer
ggtccatttctcctcttttttt

SEQ ID NO: 284 - DNA, 20 bp, Artificial Sequence
  Chemically synthesized primer
ccactgtgctttggtgactg

SEQ ID NO: 285 - DNA, 20 bp, Artificial Sequence
  Chemically synthesized primer
ggattctgtggagggctgta

SEQ ID NO: 286 - DNA, 22 bp, Artificial Sequence
  Chemically synthesized primer
aaccatgttccagtggtagaca

SEQ ID NO: 287 - DNA, 24 bp, Artificial Sequence
  Chemically synthesized primer
taacaatgaaagtttgtgtccagg

SEQ ID NO: 288 - DNA, 22 bp, Artificial Sequence
  Chemically synthesized primer
catccccttttactctgagtgg

SEQ ID NO: 289 - DNA, 23 bp, Artificial Sequence
  Chemically synthesized primer
ctagcctagcagacttgatgagc

SEQ ID NO: 290 - DNA, 20 bp, Artificial Sequence
  Chemically synthesized primer
aggaaagagccaactcccat

SEQ ID NO: 291 - DNA, 20 bp, Artificial Sequence
  Chemically synthesized primer
tttcctctcctttttgcgta

SEQ ID NO: 292 - DNA, 21 bp, Artificial Sequence
  Chemically synthesized primer
aagaaggaggtagagcatcgc

SEQ ID NO: 293 - DNA, 22 bp, Artificial Sequence
  Chemically synthesized primer
ctttcggtaattgcttgctacc

SEQ ID NO: 294 - DNA, 23 bp, Artificial Sequence
  Chemically synthesized primer
atcacagaaatgaagcaaagacc

SEQ ID NO: 295 - DNA, 23 bp, Artificial Sequence
  Chemically synthesized primer
tgtattcttcccccttctctagc

SEQ ID NO: 296 - DNA, 26 bp, Artificial Sequence
  Chemically synthesized primer
aaatctttatcatgaaatagggatgc

SEQ ID NO: 297 - DNA, 19 bp, Artificial Sequence
  Chemically synthesized primer
cccaccccatgtgtatcac

SEQ ID NO: 298 - DNA, 20 bp, Artificial Sequence
  Chemically synthesized primer
ggttctagagatggaaccca

SEQ ID NO: 299 - DNA, 21 bp, Artificial Sequence
  Chemically synthesized primer
cgaagctgtagagtatccctg

SEQ ID NO: 300 - DNA, 20 bp, Artificial Sequence
  Chemically synthesized primer
gacgaggaagacacagccaa

SEQ ID NO: 301 - DNA, 20 bp, Artificial Sequence
  Chemically synthesized primer
accccacttcccaaaacctg

SEQ ID NO: 302 - DNA, 67286 bp, Homo sapiens
cagcccacctttgggctattgtgaagactatgtgagttcatggaaatggaaatgcagaattctgcacagaaggaggtgactggtatggagcagacactgaagcctcacctgcagaggacaccttgtttacgtcagagagaggggcggatcgaggaatatgcaaggggcatttcaatagctgggtaatcaacacttggctaggttaaagaggtaatctctccatgcgctctcatgtgccactggatacctctcttggcattgcccaggatattttggaagtggtggtgaaagacagattgatcttcatcatctccctccccagcaaagggccaagaatgccatggagtgtaaagactccaaaattcaaagtacccgaaatttggaaagcagtgcttcccacacttgcacattattatatgcaagaagatgagattttaatgagctctggacagaaaaatatggaaaatcaattaaggtgtcatgaacagaaatactttgagaaagggagtggctgacaaactgatcaggaagagacataccagaaaggttaagaatgaaaattgctcttaacagcatgaatcgtggcttatgactctgatcggagcagggagcagggctggtgtctgcatgggactgagcagcgctgtctcagaaccaagctctccccaaattcatgctccagatggttctgtcaatgtggaggatggtgccttcagagcttcttgtcctcgtttaaccttcttcttcgttccctgtaggtctgtgagacagacacagaagagcaaatgctacacatctctggaaagctcagttctacctccaggctaaaggaagaagtctcagcttgctggcagcattaattctgtccaatttgattcaaacatttgttgagcactttctgtgttcaacaaacataggcacaaagtgttgggggattcaggaatgagtaagaccatgacctggccccctggccctcaaagagcttcaagtaatcaaagctatgaccatgactctgccacagactttgctacgaaatacaacagatctgaggtaggttggaagagtattttttttccaaccaatatttaaatatttgtgccactaaactaggaaaaaggaactaaggatatgaattttttaaacacacacatgcacacacaatacacacacacaaggtaaatttatgcttaaaaattgttcaatctccatggtaataaaaatgaaaattagaaagggttaccatgtatcagccgggcgcagtggctcatgcctgtaatcccagcactttgggaggctgaggcgggcagatcacaaggtcaggagatcgagactatcctggctaacacagtgaaaccccgtctctactaaaaatacaaaaaattagccgggcgtggtggcacacacctgtagccccagctactccggaggctgagtcaggaaaatcgcttgaacctgggaggcagaggttgcagtgagccaagatcgcgccactgcactccagcctgggtgacagaacgagacttcatctcaaaaaaataaataaataaaataaaaagaaaaggttaccatatatcaattatcataatggcaaaggttgatgtaccaatagttttcaatgcttgtgatagtgtatggagaggttgacatacacagctaatgagtgtaaataggcacagtctttctggaaggcaatttgacatttcatatatatatatctcaatgtttaaaatagtcatagtctttgactcagtaattccacttccaagaatctattctaaggaaataaccagaaatgtagtcaaagatatttattatcacattatttataaaagtagacaatgcaaaacaaactaaaagtccaacaatgagaaaatagaaaaatggattgtggcacgtcagtataaaaagtgactaagcaatcttttaaattagcttttgaagagtttttagtaaactattcattacaggttgagtgaaaaaaaatcatgataccaaactatatatggtgcaataccaattatactttttaaataaaaatattcatttttatttcacacctattgatatggtttggctgtgtctccgccaaaatctcaagttgaattgtatctcccagaattcctgtgtgttgtgggagggacccagaggaaggcaattgaatcatgggggccagtctttcccatactgttctcctgatagtgaataagtctcacaagatctgatgagtttatcaggggtttccgcttttgcttcttcctcattgcctttcgctgccgccatgtaagagtcttttgcctcccatcatgattctgagggctccccaactacatagaactgtaagtccaattaaacctctttttcttcccagtttcaggtatgtctttgtcagcagcataaaaacagactaacacacctatatataataaatgttcacttattatactctatgttgtagtcataatgaaaggaaatactaaataacaaaatgtttagaagtgattatctctagatggtgggatgacgggatttaggtggctttattttcttctttatatagttcttgcactttctaaattgttagtaatgagcctgaatttgacagagcatcttgtctcctgatgggactttatgacccagctcacccagatgggtcgcctgagtctgacaactgagctggggcgtggcccttcagcttaggtggaggctctgtgtctcccctgcctgtcctctccatctgagcccagttccccacttcacccaggcactctgccccacactaccccaaaatatcctccttttcttacacagcatctgtatgtggtgcttgactgtctcttcctatcatcaccacccttgcctagcatcttctccagaaggccagtttcgggtgacagtggttttgatcatgtctaaggcaaccgtgggacctgcaccctcacacttgtgaacagtccctgctcttccatccctgctgaccaggatcagcatcgccactcagatgggcagctgaagcttcacccacagcagactggctttggctgctcttctgctcctctcagtgctcttcccctgcaccatagcaccaaccagactggcctgctttcacttcctgagacacgcgtttttctctttcacctccatcactccttccagctcctcctatttcctgctcaggctccttcttgcctggaaagcctgtccctctctcctactcattcatccctgaggacactgtttggggatgtagccttcctggcccctcctctctgggaggacagatgcctctcccctgtccttactctttcatttcatcctatggcattgcacatagtgaggtctcaagaacaagccgtcatctgtgctgggaaacgtcttcatggcaaacctagcagaggtggaaagctctctttacagtgtaaccatcctcaccccagaatggtatggaactatcacaacacacttcctctccatccctggcagggctactgctcctgaagactgctgaatgctcccagccaccaactttttactactgccactgccaccagttctctctccacccaaaacaactgatgccacagagcctgtaaaatctgtccccaaaggcccagctcagggcttgagctcaaagaatttttccaagaacctcaacagaggtcttgaaaccccgagtcaaggtgtgttcatcgtgattgttaagaccatcttccccataggctgacagctgatcttttccttggctcgggcactatgcagcctcagctcatgggcatgttatggccatatagggtaggggggcaggtgttgttcagcacatgagctttggagcatacagagttgggtggggtgtcaagggttgggtgtcccctgctacctgtaagacacatgtgagaccttgggtaggtcacattaggtttctaaacctctgttttctcatctataaaatggagataatgcaaaggtttatcctactgaatgcacacagagagttcacaagtgccatcagggtgggaaggaagcagaactgtgctgtgccgtaactcctgccaaacaggctgcagccgcacagatctgacatcagttcttcaaggaatggattctgtggctcactgaggttttctgtgtttgagaacagtggccacagagcagtgatatgagaaggaaggcaacacggaggtcagagatggctctggttccttctatactccatctccaactgtgaaaccacatccatgagaccttccccagagcaggacccagcagggggtctggctggaatacaggaagttgccatagctataactacccatagctaagtactttatctcatttaatcccagcaacaccctcacccacttgacagatgaggaaaactgaggctcggagaggttaagtacattgttcactatcaccctactgggagacagtgtctggaaacaggtttgcctggcataactgctccagaggggattgatatgatttccaaatttggtgggtgtgggacaagagcaggggtgagcttccaaattaactattgggattgtaaaaagaggcaccacagagaactggcattccccagaagctccaaggactggggtacccaggaaggcttcaaagtagaggggagggaatggctccagttccttctatacccgccctccaactgtgaaaccacattcatgagaccctccccacagggtcttgaaggatgcttaaactgtacttgccagggaagtccaaaggggttttccaggcagaaatcatagcaatagcaaaggctcagaagcagaatcaagctaagccaggccagtcaagaggccatgggaagcctacactggctgaggaaaggtttctgggaaaggtatccagtatcccatgtaaggattcactcatctcagggtaggctgagggagttaggagactggaacttggtctgttactcttcaccaactcacagaactctctgtgtgcctcttccccacgtcatcaatggagaaaattccctgccaaaagcctttattgcattggcttacttactctatctctatagagaagagagaaacttgcctcttggaatcccaagagtggtaaaaacagctatgactgatggtcccagcaaaactaccatttctgagggaaaacagtgggggtcaaaacacactcctctctggtgacagcttcaactgccaggagcaagccctgcccctggtgaaccctccttatctccaagacagcagaaccaactcagggcccagaaccattcagacaactgacaaatctcaccttctagcagaggagtatcggatgcagggctgctgacagctggatgtgtctaagtgttgaatttgacaaaggtgacaatacaactattttgactgtcctttgtctttctgtatcctggaattcccactcattttgattaaaataaagttttgctcaagaatggagaaagcccctggtttgtcagctactaagacaaggatgcagattaattatttaggtcggaatacagagagccttgcatcttttttattcaagatggtagcaggatggaggggctagtatggtgtgtttggggtgtagaggacatggtttctgttgaagcatgtgtgggtttggtagggaaaaaggaagagatgggtctggagatttgcaggctgagcgttctgttatttgtcccgttgattgtgtgagcagctggagggaggatttgagcagaagggatacagcctctacttgaatgatatcccagccacctcagtgttctcttgtctctccttcccctttcctgatacatccaaatgccttcagccacatcaccttccccatggtgtctccctctcagcccaagaatggatagtggggaagaggggaagcagctaagtcaacccaggccaaggatgggaatagagttggcattaagaagagcatctcatctatgctcctggcaggccccagaagctaggctgttggactgatggccatgggtaaacctctgagaagagggtctaggtgtcaggcaccatcaggatccaggggcagcagcatctcccagagcagtcgaggtgactccaatttcaggagtttgctccaaagcggtgttcacactgcaattctttccaaaggaaacattggtcaatgtctggagacattctaagttctcacaatagggaagtgaatgtgattggcatctaatgcgtagaggccagggatgctgctagacatcccacagtgtacaggaaagccccaccaaagagaattatctggctcaaaatgtcaatagcgccaaggatgagaggccctgctccgaagctgtcttcagacatagcagagagacaggaggcctccacaccatttccccagacccctggcagcacattcccaggtcagaatatccttctccagaggcagttctgggagggggcaccagagtttgcgagttcctagcaatgacactttccagcaggagagcaagggttgggagatgggaatgcaagtgtaaggaaaggggacttcagctccccccaccatcaccaacactcagacccatccggcaaccaagggtgctgtacacaggcttctagttgatttcagcacttcagacaacctgacacttgaaggagttagacaacactgactggcccagggtagttggggggactctgggacctgagatctgcctcagcaatctccaacaccccaagagctttgcataatgcatagttcttacttccccagccacatagagagtaagtgttagccagcctcccaggtgtgcgcgcgcgcgtgtgtgtgtgtgtgtgtgtacctgcacacatacagacaggacaagactcactttagcagaaggaaacctgccttggaagtcagccatctccacttgcctgtctatggcctcagctctctagggactccagttcaacattactggaagccaacaacctctccttccatcagatgcccagtgggtgagtcagggggtggggtggtgggggggggcgctggtaatgcaataagacaacagcctttacacggaaccaaactctgagccactgttattggaggaagaccttcagaatctcagagtgtggctgtgacatctctcctgcttctctgctccatcagtcacttgtcactccatctttccctttcctcacccttaaaatgaagtaagaatgacagctaccatatgaagaccactttctatacaccaggcgccttacattcatgccattctcacaacagccatgtgagaaatttttatcaacccagtgataagggtgagaaggtggagggaaaatggctggtccaaggtcacacagccaggaagtgatggagctggtactggaatgcagtctgtgtgacacaggctgctccaaggaggatctgggaactctcaggaccatgctacaaggtggggtccatacactccaatgcggggagggctcccagagcaaaggcctccatgtgggggtgcatttattaacagtagaaactcgaattaggggaacgcccccagcagggtgggcccgtagtgcccaggggtaccaggcagaagcctatgtaaacactcctgagacctacagccaaacccctgctgctgttggctgggcaggccaggccgggctaaaaatagaaggcttctcaggtccagctccctgtgccccagcctcctcctctccccctccctccttccccacagggcaggagccaggcttctagaacgaaccgagactttaagactttcgtttcagatcaaagaggatcgttagcttgatactcaatgggcatgttccaagttctacaggggccgtaactggggggagctcctgactccaacaccccacccaactccctcctagggagagagagctgtcaacctccaaaaccaacccagggaaggagtgaggtcgaggccaaaacttggacaatctctgcacatcttgcaattcaatctggagcccctttgctgtctttccttttcctgaatctactctcaatgttgacagcactgtgcgatttctgtatttgccaggggcttctcgtgggaggtcggctccagccctctcgagaaccctccggagaccgtggggatgaggcagcgctcagccagagaagccctggagcccaggaccagcgcttcaagtgcaccgggcgggaggcaggggcgcagggagggaggctctggaccggccgcccctgctgactatggccccggtgcaggtcaaggcttgggcccggggatttcctttcaaaggtgacttagagccgcttcattagggtagcgccctcccaggcgggccctaatggcgtgtttggcagagtcagcgaaaagcagcgccctgcggctccagcggcgggggagcgccctcttccgcgccctcgccctctcccgtgtggggcagctgcgcgcacggggccatttgcagcgcaagcagcctagcgtgcggccgcggcgcccaggtcggaaaggaggcggcatcatggagctgaagaaggacatcaacgctgtatctatcgacatgctgctgatcgtgcactcggagaagcggcgcgccgcacagggtacgctctcagaccagcaggcgaacccgagctcgctgctgcagcgcggaggaggtaacgcgcgcccgacccgggtccccgggtcccccggcaccttggcctccttgccacaagggcctgcccgccggggggcgcccattgctcccccgaacgaggtcagcgaacccgaccctctcccccatggctgccgtcgcttccccgcagtggcaccggcgtcccgtggcaacgcgcagtcccgtggcaacgcgcagccccgtgattgccccagtttcactccctgtgcaggcctgtgggtgcttccgtcacccctgggagtctttttcctcccagccactccctaacgggtgtagagcaagattggaagataccctggaggaaggcggccagagcctcagggctgactcatgggtagcagaggcctgctcccccccacagcacactgcagggcacaggggacgctgggaaacctttgggctgagtcagacttttagatggggagctccctgtgtggccttgcacaatttacagcctcagtttctcctttcttgagactttctcccagcctcctatagatggaaggcatgaaaggcgtaaaaggaacgcaggtttggatagggtaagatttgaaacctgctgtctccacttgaacttatccatcaattttacttgtcctacacactttctgggtaaatttgtaagttgtagattggtaaaataaagtgactgtttatagagtgattgtggaaagcaggatccgggcctctctgttctccagacgacagaacacaatgtgaatggagtacagagggatgataatggaggttaaataagcccctgaaaagccagagaacctcagggtcctggatggcaagctgtctccgaggctggtgtgaggatgcactaggcggactgcgggccagttctttaggagttaggcctgacagcccatgcaggagaatgacttctgcctctctcctcccctccagctctggagctccttggaattcctgctgctgctctgcccttggttcttctgtccccagagcctctgtgctcattgaacatccaccttccacctgccttgcttaagtaatgctgctgtggatggccttgccactaccagccacataggctggagctgcctccagagccctgggaacctcttgggaaggcaggcaggggaaagaaacagaatctagagggctgagtatgttgacaggcgctctagtctcagggctgattcctgactgaagcaggagttgtttggattcgttggctctttagttatcagacctactcttgggagaaggggaaatggcctgcccagggtatttgtagttagaaagtcaacagagggcatcaacttcttgatagaaatgagactgctctgaatacatgtaccacagtccagaatgccttctccagtgtgtggcgaggcctagttccaggtcagcccacgagtcccctactcccaatcctctctgatcacatcacttctaaaggctctgacactagaaagggcaaagaatgcagagaagcccaggaaacaccaggcatcaggactgccctgagaggtgcccaacacctagcacaaactcgccatggctccagactcatgtatgcacactagtgactatgacagagaaaaaaagacccctaatggctgggccctttctgctgaactttttctccaaatatttttctgatggccgtttctcaccgatgctatgaatgacagtgtagagatctgtgtcacttattcacaaccagagcagagaagaggaaaagtgcatggcttttgatgcctggtgggcagagatgatattcaggagaccccaggcaaagccagcctgcagaccctttcctcgaaaaacagcctaagggaggaaaatgcccaataagaccagcttgttccaaagcctcccatgggtgcaagatataaaacaaactcttgctcacttccaggtatctcctcctttctcctccacactccagatcctccactggagagtggatcttccttggttatataaaagagggcctaggctccatgtcagaaaagatcaaagctcaattattgttgcaatgcagaggatggagtaatccgtaacgagtggcccttctgctggaagggccttctgctggaagtggcccttctgctggaagaaaagagtcagggggacaagaaggcaaggagagtgtggacaggctaggtcactaggaatttgggctgcagagccagcagatgttctctcccatttctgtaaggccctagcagcctcccagtcatttccctagaacagtgcttctccaaaacgtgcctgaaagccctcaactcctatcagaaagtagagtgcatatactcctgcagcagtagaggatatagcctatagctgcctggggcaagacccaatgagctttgaagtcttaggtcttatcccaaaagtctatgtggtttgtgtattctactccataggtgtgtcatgagggttccaagtggtaagtcactggcactggctatggggggctctgcagaaaagaagggtgttaagaagagagtggcggcccctgagtggttgagagggctggagaataagactcaaggctgagcttccaggaacagtaccgtaagcagcaccaacgagctggtctagtgaggaaacctcctcggccaccaaggagcactgaatactccttccgcgccaggatctcaattttattgcagcagctcccgctgccagaacgtatccccatgctgtgccaggaactcgaccttgcggctaccacttgcagccgcagccagagcgagagctttccttcccttccctgttgcatcaccaggtcccaaggcagagtgaaacacaggtacatcagattggccatggctaggccatacgtgtttaccctctagctgcaagggaggccaagagaactggcaactgtcattttccattcccattgggattgacggtcttagcccactccccccactctatatcaagactctaaaagtgggtgattcaccacatacagaaataggcaggcaatgtggatagcaaatgacttctaaaataatgctttcatatgtatgcagtggagaggtggaagtggaaaatgggcatctgtactacaaaaattctccctaaatgaccctgataaccaaccctgctgcccttgaaaactgttttaacagtttttaaatgttttgaattttgagagttgcattcattccctcaagggcatcttattcatgggtagcctctctcagattccaagagagccaagatccacctgctctaccataacctagataagtctgcaactggtacatcactcttttgccctgagtctcccacctcagagaagcttgttattttgcaggattccaaggtgttggaaatggagtccgaagatggcagaaattagaaggaaatgactttcacggtaaattctctttttcctttcaacctataggatttaatacattgaataataactggaagaattgggtttcactcatttgaagactagccctagacatctaaccactgaacggaaagtggctgctcctgacccagccaggcctctaagggccactgtgactgtgggaagtgttccctggagtcaggtcccctgctctcctggaggctgtggctgaagagcagtgccaggaacttgagcacccatttgtttgctggctgagccgtaggggaggacttaacatcccttgggatggtgaggtttgagtgtgctcctatgagaggcagccatctatcttttgaaaatgtttcccaacagagaggatagtcgtctgccttgggacagtatgacttgaagcctgagaagatgccactcaagggttctatagctccctgctggcctgggacccaaaatacaataagaagtcagcttccaaagcctcttttttccagtgccaggcatctgccaccccaggcccaggatctctgtggtaacactaaggggccaagtataatgggctttattctattccctttagggttcattagcccagcctccagggacaaacatcagggacactgcacagtgggcacgtgaaggttctaatagagaccaaacctctactcccagagccccagtagagaactccatcagcccgcagctatgtgagccctaggatcagatgactggcttatcaaatgccagtgtaaaggaaccaccctccatgacacaaatggggaaataggattgcagatgaataggactaaactgctatgttctaccatccttctgacaataatgaaagggaaagatgaagttctaaaagtgaattcattcactcattctgttcacaaatgcctatagtgcttactttgtgccaggcatgattctaaatattggaaatgaaacagggaaaaagacagccaagaacactgccctcaggggagctacattaaaatgattggaattataatgcactgcaggggagtctcaacaccctggagttgaagagtcttcctgtgtcccctgcctttggtaagagtcctcaagacacactccccatccccaccccaccactgccagggagccaccctgacaggcatgcatgggtgcaatggcttccctgtaatcttgctacaggggccatcagctggtagacatgccagctttagctctactgaagtagacgccaaagctaacaaaactctgctatgggttattgagaattttaataagaatcagacccccagagacctgttagccacagaaatggccatgcagggcatggaaggtatgcatgctaagcccatgtgtgagctggtgagtgggcaagcaagccacaggtggaaacaaagaagcacagcatccttgttggttgcagctgtctcataccttgcctgagttgtctgacactcatcttagggcttctcaggcatgttattacatcaggagaggattgaaatacactgaattcattctatttttaccatcttccgggtttctgatttgggagaagtttagtggaaaaatatcacaaaacacaaagtgacacattgactattacaagaccattataagactcttgtaaaagacatgaagtgggtcttagcactatgtgtcagctgatagaagatgactaaaatagttcttgcaaaaccaccatgagaactggaagtttcaggtaaatgcagggctggacagaggctccacagaggccctgagcccagaaaaaatgacgcttctaccactccatcaacatgtgtaaagcgaaatttcatttatttttcaaatggtacgtttgcatgcatgcagaaattaaaattagtttctttctgtgttttctgatgtcgagattctgagtgcaggtattgaagctgaccttttctcatacctgccttactggtgcccaaggcacccagccctggtaaccagcaggccgcccagccctggtaactggatggcttccatcttagaaggaagtggctgatggcatgtgctggtggagtgcacacagatgctgctgagcatggggtggatccagaagggcacattttccccctcttgctaccccgtgcactgcttgggctggaacactggcagggtgttgagactagagagctccaaacttttcgaagcagcaggtgtttgggcccagccgcctcctcaccctcctaccccaccccaatagcttgcccagcaacgggcttcccctgctgtgattggctactttccttggtcctggacaaagtctgcctagtagcacagggacagacgccccacagctaaagggaaaccaattgtgcagccttgactataaataccccacagcagctatgccagccaatcaccctccttgaggattcccttcccggatcttgtttcctccctcagccagccgaggcactgccagctgtgcctgcagaaggcggtcctggcctccctttcctcgcctgatctggggctccagccccgcatgccacatcaccctgtattggaatacacagtggacctagcccttggctgactagtgtggggctcagggacctagctgggcctgttcataggagaaggctggaggaggcaggctttccagggcaggactctgtcaggtggatcacaaatccagcctggctcagtacctcaccccccaccttgattggcttctgcatgggcccaggcacgggaaccactgagcggctgatctgcacaagaagaatcatctaaatgcacctgttcaggccaatgccccagaggcatacttgtttccagactaaggcactggtcccattggtcacttccagtgacaagcccactgcaagccagcaggaagctatagagagaagatggcaggccagagtggtagtggtgggggaacctccagctgccaccatcctccccttgcccagccttccccccacccctctgaagcagaggttcaagggcagcttcagtaacagcaggccacagcagcagctgtaaagaagggaggaaaggtcatgcttcccctgggagggcaagtaagcctgtgagctcccgcttcttggcctatggcaggaactaggcatcactccatggcagcctgaccccactaggctctgaggacaactctgtgtcccagggacagaaatatccctgcatgtggagagaacgtgtgtagcgtgcatgccctgcaaatgtttgtgaaacagaaccaaactacacatcatcccgtctcctaggctggggtaggaggcaggctggccccctgttcttctcattaagaagcaggaggctcggccgggcgcggtggctcacgcctataatcccagcactttgggaggctgaggcgggtgaatcacaaggtcaggagatcgagaccatcctggctaacatggtgaaaccccgtctctactaaaaatacaaaaaattagccagtgtggtggcgggcacctgtagtcccagctgctccggaggtggaggcaggagaatggcacgaacccaggaggcggagcttgcagtgagcagagatcgcgccactgcacttcaccctgggtgacagagcgagactccgtctcaaaaaaaaaaaaaaagaagcaggagactcaactgggagtcagaagacctgaggttcaagtcccaggtcagaacctcccagcctgctccacagaaatgtgtgaagatcaatgaggcatctgtgtatgcagtgcttttgaaactgtgcctggtgacaccaaagttgggagttatggctacaaagaccatggaagactggtagcctgttccagaagaaacccagcctgtgctggcacctgctaagaggcacaaggggtgtgtgcacaggggcttccaggcatttgtctccatgcacagtgtcgtgctggtttgcacatgtgcacactgtgagggtgtgcacacatttaggcctggggatgtgcttggcccccgccagcccacctttcccgcaaacacatacagctctttgctctgcctggggaaaattccccagtggtcactgcaggcctctctgtcttccttaaatagaaaacttggtggagaagcagcaccctcagcagccccaggtcatcacttcctacaacagccaaggtaagtgattcgccgctagccgtgacctcccctgcagaggtgtgcccagacctgatgctctggccagcgacagcccaggatgtggagctcagactatggggagcagggtcctctctgctcccatgggtgttggaaaacccttttcctctccctgcgtctcatgggaagcagcaagaggctgcacagtctcagtcttcccctcaccatgagatcaagaaataaagcccatgggcctcagagcacgctgctgtcatcatcatcactattactgtcatcactattcaacattcaacatttgttgaatgctaactatgtgccagacaccctgccaagccacttatgcacttattctcatgtaaattaagcttcacagcaaccctgtttgacaggtactcctctttaccatcctcaaattacagatgagtaaactgaggcttggaaaggctgtcatgtgttcaagatcacatggccagcaagagtcagagctgggcagtctgagccccagcaaggcctcagctgttaaccttcacacatctctgcttcctcatctcccctggaaaccagcctccctccctctggctcatggcatccaagccctcccttgtcctgaccaatagcagttcttcggcctctcctgctgagactgagccttcccagggcatcccacccagtgagtttgccacagcaaggcagagtgagaggcaccttcattgggagtcctcactttttggggacaggctctggggactcggggaaggcaggcaagggcatcactgactacagttgactggatctgagcacacgacaagatagagacaggagggccccacagcaatggtgacaggaggccaggttagagactctcacgcccaccttggttaactgctgtgcattaaatactgggccctggtgtctgagtattctcacaggctcagccataagagttcatcacgcttgctctgagagttgatgtcctaacctataaggaaattatctgatcaaattcagaggcagtgatttcccccatgccccatatgaaacaggaggactctggaggccccggaggattggagcctctcagggaattgctctctgaaatacaggtggacaagcttctctatagaaaggcgctggcaggtagtgatgaaaggccagccaactgggattaccagcatgggggagctggctctcctcacagtacaggccagtgtccctttaagccagaattcctgagaatgcagctctatgacagccttagagacctctgtgggcccagcaggacctgccaccagccctgagaactacaaggacaagcccatgctctgtcctgttgcttctctaaaatgaactcaactgcacatggctcaacacaaaaaaaaggactcagagatatctggctataatgagagtggattagcaccacttacctcacttagtgaagaagacagacaaaggcccctgtccttgtggagctgacatcctagtgaggagacacagacaatcctgacaagtcaaacaccctgagccagataaggtataagggggaagtaaagcaggaaggatgataaggggtgtgtgcgggtatggggtctggggctgtgcggggttgtatattcatttcctatagcagctacaggaaatttccacaaatgaggtggcttaaaatactgcagatttattctcttacacttctggagcccagaagtccaaaatctgtttcaccgggctaaagtcaaagtgtcagccgggccagcgttttttagaggctctaggggtgcattcattccttgcctcttcctgctgctagaggctgcaggcccaccatggcttgtggctgcctcactccaaactctgcttccattgtcacattgccttctctgcttataaatagctgactctccctgtgctcccttgtttaaggatatgtgtggtcgcattcagagcccagccagataatcaggatggtctccctatcttgagatccttaatttaatcacatccacatagtcctctttaccatattaggtaacattcacaggttccagggattctggcatggatatctctaaaggccattcttcagcctatcccaggggacaatttaaagtggagtaggtgagaaaggcctcactgagaaagtgacatctaagcaaggaaagaggtaagagcaaatgatgtgggtatctggggaagagcttccagcagagggagcagtgagcgtgaaggcccccaggcaggagcgtgtctgcatgttcaaggagcaggaaattgtgctgtggagaggaagagaggggcatgggcaaggtgggggtagcagaagagccagagaggacacagggcagagttggcagggcctgggaggcttctaatctgagtgtgattggaaaccattagatggttgtagacatccaatgcgtagagaataaacagagggggcaaggttggaagcaagacaacccttaagaggcattgtgataatccagcaagagaggttcccccatggtgtggatttggggtatacaagagaggagtcaaggcttgggacctgagcaatggggaggatgaagatgagggagatgcaggaagagcaggttgggaaagaaacatgaattcaaatttggctttgttgaggttggtgccagcacctgccattttggaaagctgtggccagggaatcgttactccatgtgccactttcttattcatctcatgagccttgacaacctttgggctctgttctgcgaaccacaccggcccccagagaagccttcttggaagctctatcacagtaatagcgttgaccagaggtgggacacttggtgtgtgccagatattaagctaagcccctctcacggctcacctcatttaatctccacaaccaccttttgtggaaggttatcatcctcattttacagatagggaagctcaaagatatttaaataacttgcctgaagtcgcataccagacccagaagttgaacccatgtctgtgggctctcgaaagcggtgggcttaactactcccccatactgtctcttccatacaggacagggaccaatctggtggtgttgatttgggtgcagtaccccccacccaacccccaccctcaatgtgcagtctgagatttcagtctgaactcattgctcggaatggttcaacattttctctcctcctcagcctctctttcaatggtagactttatgcaacaggtggcaaaggaacattggaatcttgggtcatgggaaggggctttggagatggatctgtagtgggtgtgtgggttgaatgaatttgtaaggagagtaatcacaaggagcccctgcaaagaacattctttctttttttttttttttttttttttttttttgagacagggtgtcactctgtggcccaggttggagtgcagaggtgcgatcatagctcactccagcctcaaactcctgggctcaagcaatcctccttcctcagcctcccgagtagctgggaccacaggtgagtgccaccacatggctggttttttttttttcgttttttgtagagatggggtctcactatgttgctcagaatggtctcaaacccctgggctcaagcaatccccctgtctcagtttcccaaagtgctgggattacaggcataagccaccatgcctgaccccaaaggacattcttgaggagtcagttttctgttgaggcttctgtcctcaaggtcatcagcccttatccccatgcaaacactttgtagagtagtcttctttgatgtgtgcactagggtcaaactgccatgtttccagacctcagacctccctgtggagctccaacccatagaaggaatcatgaatggtcctttgttttccgttcctaatggaagccatgggcagggctgccagtgatgcccttcatcatgcacaccagcagatgcccagtcacagccctgagctctggaacactaggttgtcatctcataatgagagctgctgagtggggttttcatgctgtgtttggcagtaccccctaagggtggtgttccatcatgttctacagagctagacagtccctgtcaccatctagcaggctcattcctgggatgtcactgctttccacttcctgactactgcatcctgggtggaatcacagcatgtctctgttgaatatctaaccagggactctttaagggtatttttttttaaactaccaatgctttagctgttttcctgactctaagctactgcaggaaaaaaaaaaaaaaactccaaagtagaaaaaaaaaaaaggctgtaaatgtgccaacctgttatagaaaaagttaacaaacaccttaaaccaatgatggcaagtatttcacatgaatcccatgacccctccacacacatatacacccgtgtgcatgtgcacatgcacacacacacacacctgacagtcttcgttaattgatcccttcaggcagccacttccaatcagtcagagttaatgaaaaacatgaaacctgtttgccatactgcgttaggtgttctgagccaattaggcctttagataaatcctgattgaaacctgaagagatctggagagcagctgtcaggtggaagaaacctgactgggtgaaaggcagggcagtaagcatgtggacattcttgtgcttgcctgtatgctctgtttctgagaaggcagggaaaagcaaggagagctggcggggtctaggaaaggggccagggagcccgttctcaagattagcagaaaataatctctaacatgctcttaactaagacggtcaaagctgcagcttcagaaatgtgattttgttgacaactggtggagctggggagggatgcatgagagaggccagccaggcagcctggaatcccaggaaaggcctcctgtaggtttggttgtggtggttaatagtcaagattggaataatgtactgtacttaggctgtacttagggtttagatctgactgcgaattttactccaaatgatctactctctgttagagattggccacactaatattttttcttaaattaagagttttatttgatccagtagcgtcatagccagcaaactctctccactccatgccttaaggaagcataaagctatattgtgaatgcttttccccttgaaacagcgtgtccagcccaggcccagttcctggagccagcaaagcctcccagtggtgccctcacacaacagtaagtgagagcaggaatcacactcccatgcagatcagggaggacgagaaagtggctgttttccttgagggaatgctaagcagcagcacagctttgggggagaaccgggaagtgggattcaggaaaatattggacattgacccctgtccaagagggaagaggaatcacagaaaggagagaagggattaggaatagtgatggctggagcatctgggccagggccgtgctccgaacatgagcccacctcaacaccctgccctggaggggctttaacagcagtttgtttttcaccttgatcactctttcacaaagagacatggctgaagtaggacatggctaatacccatagagacatggctcagggcatgtaacgcaggatggcaaacaagtttcatgtttttcattaactgtgacttattggaagtggctgcctgaagcgataaattaacaaagactgtcagatgtgcgtgtgaaagtacctgggcattatgagaagtttggggaagagatttgttgttgaaccctatgccaataagttgttcacttttgcagtttctctaagcttatggagattgttccagtccagcattttccaaatggtgtttgacaaaatagtactgggtcaaatagagttctttactacaggactactcagatcattgtgtattgtgacctatgagaggggagagagtgaacatgtttctcaattcatttttcacaaggcatcttgaagtcaagtaccacttagcactcactttaaaagacacctcagagggtttgaggtggagaaagtgaaaaggaaaagaacaggcccatgcctcactgatgatgggaagacacacagaaagtatttgctgctgatggcgatagcacccagtcctacgaccagaactgaattatgccttgaactctgaaatgcttaatgttttaattacaaactcacaaggctgattttctctcaacattgaatatgctggaaactacacttcaaaatgaatgttaaccccttcaaagctatgctttgcagaggccacattgtatcttttcaaattgtttgagaatgaccctctttggcatgcagaacaagtttatgagctacacaaaaaagacagtattgttattctatgaaaaataattgcaatgcatttagcaggcaaagggttagtaaaaggaggttttacaaaatcaatgaggaaaaaataatacttcaataggaaaatagccaattcacaaaataagaatttaaaatggtaactaagtataggcaaagactactacaataaaactaaagaaatatacaacacaaccaggtattattattcactgataaaaatttaaagggttgataaaaccaaacatcagtgagtgaatatgtgatctatttttgcattacaaaccaccacacaacttagcagctttagacaataagcatttacgagctcaccaatctgcaggttagctagaaattctcattggagccacacccagctgatcttgggtcttgggtgggcttgctcatgtgcttgttgtcagctggtgggttggctggagaccagctggtctgggatagcctcacctgagaggctatgctgtgctccatgtgggctctcatctacaacctggctcattcacatggctgttatggctgggatcccaagaatgagaatggaagcctcaaagtttctagaagcctaggctcagaatttgtgcaacatcacttctggcatgtgctaattggccaaaccaagtcaaaagcccagcccaaattcaaggggtggaacaaaagacctctcattgggaggaattgcactttgtgaccagttttgcaatcaagcacagcaagaatgtgcacaatgggcattctcttgcactactgataagatcatagattgataaaatcattcataagaaaattttgccaatatctaacaaaagcctttaaaatatccatattatttgattcatacttcagaatttattcaaaggaactgatttgcaaagtgtgcaaatcactttacatacatacaaagatgtatgtatctgagtgttcatcacatcatttctaatagcaaaactgtaaaaagctaaatattcaacaaaaagggattgcttatatggattataaaccatctacaaaatagaatactatgtagccatttgaaatgataacatatggctatgctcactgacatgtaaagatttaaatgaagaaagcaggttatgaaaaatatgtttactataatcggctttggatttttaaatgtggaaatgaagtcttaaaggagtttcactttctgctttatatcgttctgtatcatccaagtttttgttttaattctgcttgggtttttttgtgtgtggttggtatttttgcttttatttttattttaaattaacatacagtaaaatcgaatgtttgtagtgtgtagttctgattgctaacacatgcatagatttgtgaaaccaccactatggtggttaccatcatcagaatatccagaatacaccaccatcggaatatacagcagttctatttccctctttaaaattatcttgtgtggactctaatcctcccatcactcttaagagttcctttgtattgttgagaagtactttttttttttttttttttttacagagtctcgctctgttgtccaggctggactgcagtggcacgatctcggctcactgcaacctccgcctcccaggtccaagcgattctcctgcctcagcctcccgagtagctggggttacaggtgcctgccaccatgcccagctaatctttgtatttttagtagagatggggtttcaccatattggccaggcttgtctcaaactcctgacctcaagtgatccacccacctcggcctcccaaagtgctgggattacaggcatgagccatcatgcccagctgagaactatttcttgatatggatgtaccacaggttgtttatccattcactcattgaaggacgtttaagttgtttccagttcagggtgattatgaatagagctgctatacaaacatttgtgtacaggtttttgtgtgaacataagttttcatttctctgggataaatgcccaacagggcaatttttaggttgtatggtaagtacatgttttgttttataagaaactgccaaactattttccagagtgactgttctattttacaatcccactagcaatatatgagatccaatttctctgcatccttgtcagcatatgatattatcactatttttaaattacagtcacccctcagtatacatgggggattggttccaggaccacccacatataaccaaatgtgggcatactcaagtcccacagtcgtccctgcagaaaccccatgtaggaaaagttggccctctctatgcgagttttgcattccatgaacagtactctccatctgcatttggtagaaaaaaaggaccatatgagtggactcgtgcagttcaaacccatgttgttcaagggccagttgcatattgttgctcttctaatagatgtgatgtctcattttggttttaacttgccttttcctaatggctgatgatgctgaacatcttttcatgtgcttattttccatccaaaatctcttttatagtaaaatatctattcttttgccctttttccaactgaattgtctttgcacttttgtaaaaatttattttgctatgtttgtgtgagtctattttttattattctgtttattgatctgtttatctatcctcttaccaacatcacattgttgtgattacagcttttcattaatgcatcttaaaatcaaagagtgggagtcctcccatctttttttttcaaaattagtttagttattccagttcctgtgccttgatgtctatattttataattatatatttgcacaattcccccaaaatgtttggttgaacttgcattaaatctgtagatcaattttgagagaattgcccacttgacaattttaagtcttccaatccataaacatggtatgtctccccatctatttaagtcatctttaatgtgtgtaatcatattttggagttttcagtatgcgattattgcacatgtttgggatttttgtttgttttagatttataactaacattttaattttggaactatgggaaatggttatttttaaatgccatctccaattgcttatggccaatatacagaaatacaatcgatgtttgtatgttaaccttgtataccgtgaccatgctaaactaacttattagttctaggagctttttcttgtagattacttgggatttcctatgtagacagacatatcaactgtgaataaagacagttttatttcttccttgccaatctgtatgccttttatttctctttcttgtcttattacacagggtgggacttccagtacaatattattaggatcagtgagagtggatatctatgacttgttcccaatattaggaagaaagcataaccatgtttcaccattaaatatgctgttagctgtatgctttttgtaggtttcctttttcagattaagaaagttcccttttattcctagtttgttgagaggttttatcatgaacggatgttaaattttgtcaaatgcatttttctacaccaataggtgtgatcctagtagtttgtcttctttagcctgttaatatggtgaattacattcattgatttccaaatatttaaccagctttgcattcccaaaataaaccacccatggttgtagtatatttttcttttactatattgttggatttaatgttgtaatattttgtggaagatttttgtgtttacatttataaggggtattggtctgtagtgttcttttcttttgctgtctttgtgttgatatcagattaatgctagcctcataaaatgagttatgaagcattcacttctcttctgttttacgaaagatcctatgaagaattgatgttatttactttaaatgtttgttagaatttaccactgaagctatctgggcctggcttttggggggaagattttaaactacaagtttaatttaacaaataggtattgggaatacttaggttatctgcttcctatatgagttttgtggtagttagtgacttttaaggaattggcccatttcatctaagttgtagaatttatgtgcacagaagttttgtagcattcctttattattattttaatacatatgagggtctgtagcgatagccctcatttcattcctgatattggtgtatttacccctgatttgtgtcttgcctcttttttttcttggtcattctagctagaagttcatcaattttactgatctttaaaaagaaccagcatttagtttcattgattattctctgttgctgtttttaacttcagtgatttattctcttatttttatgattttcttccttctgcttgccttggatttagtcttcatttctctactttcttaaaatggaagcttagattgttgatttgaaacctttcttttttctgtaataagaatttaatgctacaaatttccccttgaagcactgctttggcttcatctcacacattttgatatgttttattttcattttcaatgagttcaaaatattttctaattttccttgagacttcttctttgatctatgtgtgatttgaaagtatgttaatttttaatacttggacattttccagttgctttctgttttttacttctagtttagttcattttggtcaaagaggagttttgtatgatttcagttctcttcaactttttaggtttgttttgtgaccaaggatatagtccatcttggtgattattcaatgggcatttgacatgaatgtgcgttgtgctgttattagatggaatcttttataaacatcaaataaattttattcattgtgtagttcatttcttctatatatttgctgattttctttcaattaattctctcaatgactgaaagattagtgttaaaatctcgaactataattgtagatttgtctattcctccttttagtcctatcagttcttgtttcatgtattttaaaactttgttgtttgacgtatgcctattgaaggttgttatgtcttcttgctaatattcctctatccctgatattttcctttctctgatctgatattaacatagcaactccagctttctgttatcttttcacttaaccaacctatatcatagtagttaaagttggatccttggaaagtgaatatagtttaatcttatgtattcaccctttctgaaaatctctatttttcaattagtgtgtttagaccatttacacttaatgtaattactgatacatttgtatttaggttttctactttattatttgttttctgtttgtgcctctgtttcccctttcctgctttccttgcctttcagaattacatttaaatttgcctatttttttactatatctccataatagctatttttgtatgtattatatgtacttaacttttcataatctattacaatgaatattaacatttcaagtagaatgaggaagtcttacctccatataggtagattcactctcctactctatgttgtagttgtcatatattttacatctaatatatcaaaaacctatcagatgttataattatttctttcaattattattcatattatcaagaacttgagaggagggcagactaatatatttatctagatatttaccatttctctccctcttccaagttttcctctggtataatttctcttccgtctgaagaacttccgttagcatttcttttggagcaagtctgttggtaccaaattctcttggctttacatcgcttttcactggctactttccatatttttttctttaatagtttggttatgtgtctggacttggattttcttacatttatcctgtttagaattcactgagtttcttgaatcagtaaggttttatgtcttttgccagatttcagaagttttcattattttctcaaatattttttctgcatcatattatttctctttgccttctgagacttcaatgatgtgactgttagacttttgggtattgacctacagatctctgacgcactacttacattttctattgttcaaactggacgatatctgttgatctatcttcaagttctctgactgtgttctctgtcattttcattctgctattgagtatatccagagaatttttaactatatttttcagtctaaaatcttcacttacttctcctttatatcttcttttttatcgctgatactttatatctttccatttatctcaaaactgtttgctattacttgttagggcatgttattgtggctggttttttgtgtgtggagttggcatctgttggttatcttttccttttcaaattaagactttcctgagtcttcctagctgagtaattttgaactgtagcctttgcaatgctatacagatctgccctgcatgtgcaccacccagtggccagtctggaacctgggccttaatctaccccacagtttacttcctgaagactgtggtatgatgtttaggatgagatctatgcatgcacagttcagaggtgaccacaggagtccatctacaactttatggaattgccttcttgagctccctcctcttcatgacccatttctcattcctctacccaaaaagctggagcttcagtttcctcactctgccatataggccccacaactgtgtctgcctctggggcaaatcagcagaaaacagagagaaaaaacagtaaatatttgccctcatattcttgggattataacttctctggtagaagaaaatagttatgcttgctccagagttgtaggtggctgcatggccaccaacatcactgctgccattgctaccaagagaattgcctgggggctgagttgagaaataacagaataaagtgggggaaaaacaacaacaaaagatttctttcactctctctgactcttaggggttccctttctcactctgcaagccagaaagagaggatttctcttgtgtgctctttttctgcatccactgtacccttctgggtttgggaatgcctttaagtccagtctagatgataccagaggggaaagaagaatggtaaattcactgccaatttgctaatgctttaaaaattcttcccactcttccccagttattctattatttactttgcagaatcctctagtagttgccccttacattcagtacattgtttataattgcattcagtgggagagacagggctgagtgtgctttactccatcttgcctgaatctggaaactatctgcttggtttgttgttgttttgatttaaagaaaaaaacaaggatgatttgtacacacaaaagaaagttctaaaactaattgtttttttattcaatcatcagtcatgaggcattcaccctttcctggcagcatctggttgagaatgtcatctccttttcctttgtagggacacaactgactgtggaagtccaccctcgagatgccatgccccagctgctcaagaagttctccttggctaaacgtatgtatgacacaggtactcatggtggagggctggcagagaggattgaaggcagctggttgggccagatcccagcccaagcatcttctgagggaaggagaagagtgacatgggcctgcaaactgggaaaaggcagaagcatgacagctttatcctgggagactcttttctctacacccagctaccgctgattttgcatctctggaactagtcataggtaacacagacatttagctgaagacacattgcatcacaagagtgttgttgctgttgcttttagataccatttgtttactgccagaaaagtggcatgcaaaatgctaagtactttaacatttattaactttttaaccttttgatgtatactaatatcatccccactttttagatcagcaaagtgaggcttagagaggtgaagtaactacccaagtcacccagctaagaagtgggtcagaacccaggtatgactctgaagcctgtggtcttaaccaccatactttgctgccctcagtgcagtgcacataggcccaggcccaggacgatgatgtctccccaactcccttctcggtcctctccctgcatctgtgcaccttatggttaaacagggacctcaggaagaatgcaggttaagtaacagaggctgcagaacaactgaggctcaagtcctctttaggtccatgcagtgagccaaagtcctccaaaactgtctggtcctgtagtcatcagcagtcaggatctcaagaaagtagtctactgtaaagagggcaggctctagggtcgactgactgggttcatgtttcagctgtgtgaccttgggcaagtggcctaacccctcttttgaactcagttttgtcaactataaaagaaggaaaataagcgaatctgcctcataagattattatgagattaaatgagagagtaaatataaagcccaagccaggcatagtaagtgtgtaacaaatgctagctatcatttcgaacctttatcattctatcaaaaaggtaggtgggaaaaaaatgtaggtgtgaaatacaaaatgcaggtgtgagaaataaatggagcactgtttctcagaataacccatgtgtggttgcaatcttctttgttatatttatagcctaaagtggccttcaggggcataaaactacctgccttggcatccccaccttcaactcccctgatcccatcagggacccaaatcttcctgacctggttccagatcggcagggaaagttcctttccttttgcccagggagtctaataactattggctacaattctgcctttacggtcttagatttatgggattcagttggcctttaatcctcccaaggaataatttaattatgacctgacctttctaggttttgaccttcacacgaactgctttccccttcctgcatctttgtttccatccatggtcagttcttatcccggcattatctggcagtggattcaagaaagcaggaaactccaaaagagggcaggaacaccaggttccaggaggacccaatgaatcacccaaagtgttaggtcagagcaaatactaactccagttgcagaatgcagctccctttcttgtcagccacttcctggttcttagtcttccttctgccacaccaggaagttcctggcaattcaagcagcaattcagtggtcagtggggtgggaacaaggagactgtgaaaaggagagtaaagaggaggggtcaaaagcaaggaccaccagaaggtgagtcatcagtgcttgcatttctgtttcttctgaagtatctatacttctgatctttggaatattgtaggtttacaaggtgataaaaatggaaacacaagaccccggcaacctggagggaaagatgcccatggtaagttccagagtcttccaggacaattctcaagagagcacatgggtttagcctcatagactaatctccaattgacagttgcttcctgggccactatgctgagaggctggggccacctttgggttcaggaggggaagagtgtcatgattgattagcaatgtctgccatggacacaggtggagaaggaaaaagctcatgcaccagatgtcatcctaaagctaaagtataaaccccaccaataacaaggcagaccattataggaaacatattaaaatcgtaattcaggattatgttaactttaaatggaatgccaaatgtctgtaaggtaggaggcatgtgaataagcagagtgaagcagaggaagaaacactgagagggatgatagacagcctgggttggaatcctgcttttgcccttcatttgccttccctgtgcctcagtttccccctcagtagaccagatgtcatctaaggcggggtgcagctccatacttcttcctattgttttgctttaaaatcagaataatttagttaatgatactgatgttttaaatgtatttatgtagaatcatacttagatcttatataatctcctcacaggtagatttaatgaggcataaatcatgggcatttttaatgttcagatgttggaaaatggaaccaagaaaggggaaaactagtaataggattttcaataccatttcagaaatgccacctttattctaaataggagtgcagggagacctcatttgcagagctatactgagtggaaatctgttcgatgtgtgagtccactttgaatgcacttagatcgccctgatggctcttgtgagagaatgataggaacagattctgcagagcaagagggcactgaaaagaggcaaggctcagcaggggcctgcctgagtatccccagtcttctctggttgcatttggaccacacagcacagcggttgatgacataagtcatggtggccaggcaagaaacccctgggcccaaatattggtcagctccccaataagtgggcattgcctctcaaaccatgctggcccagaagagggtcatgaaggggctggagccaggtctagaggtgacacacacccctccccaccttctccccacatctctcaggtctaatagcaccagattaagggactctcactgacagtggcagccctgacgacgtgtgggcaaatgcacctgcagtgtcccccaccaggcagggaggccacatgtccctccctgcatgtacctgcagaggagccccacagcctgcaccctcccagagagcagtgtgacgctaacatcacaacatgatatgctcccaggaatcccacagatgtgtgcctgaggccagagggctgggtccagtccctcccagcaaggtggaagtcagaaccagactggaaccaaggtagaagtgcaggtccatcaggtgctttctcacatagccctactcttcccagacttccctaccataccctggggtctctccagcacacctcacttgcccagcacccagaggctcccgacatggaggctgaaggtgggtgggtccacctggatcaggggctcagttcctctttggtcccaacttcttcccacccccatcctgtcttcccacccagctttcctgattttgatctgcctgactcagggacccttggttaagaaaggctctgccagagccaaggctctcttctgggccgggacaggggtctgctgtccatgcacctgttggtctaaccattggccaggcagccttgcagcagcctcccagcaatagctgattatggctctcctatgtccagtgggaagcttgcatgattgctggccctgcatcagcactggtctctagttttctctccttcctgtatctctgtctcagagacctgactcgtggtttggtctctggtcagcaggctccctgtgagtaaggctaagcatagatgagtgatttggaggcccagcctttctcagggccctgttaccagaacgccatcacacatggttgagatgctcaggtctccagttgaccaagggcaaaggaggaagcctgtctgggtgccaaacgcacctcgccctgcaggacccagatggcccggcctttccatgccctcctcctccactgaggtgtcctttggcacctccaccccagggccgtggctgtggcacagacctccctccttgagcttgtgagcacgagcagcactgcctggacactccccaaagagcattcattcctgggaaaaataacagggaatccacggaaaaccaaatggtgggaaaaagaagattccatcatcaatatgtctgggaactactgggttaactaaggttaagcccgtttcctacttctgacttctcagagtctacaataggcgtatgttccctgtaggcctctaagaggactatgggagttgccatggttcccaaactaacttgatcaggggacccttctaggaaagttcccatatagctcttaggctcaatgtttcaggctttgagaattgtgttaaaggttggacagtcacagctcctcaaagagacagcaaggcctaggccaggcagccctcttcagtgggtctcagctgctgaccaaggtgccctgtgtttccagcctacccctgggatcgatctagcctgaaatccatgtccctggacctgcagcagtttgagaaattggatatctacgcctcacaggtaggacagctggccgctctgaccatgggccccttcaaggtggcttagagttctagggcagcaaaacctctccccagacacctcctgaacatatcctgagtggcttggttggatggccctggaatgccttttcatagcatatgggtggggacagaaggcactaggcagcagcccctgcccagagccagaggccattccatcccccagcccacccacgatcctgttgctcccaccccatacaacacaccctggagctcttcattggcaagcccctctggccagccctgacctgccttctccatgccccttttggcatttctgctcctaagctatgcctgcctccagtccatggaagaagggaggagaggatgggaggaccgtggatgcagatggccaggaccattataatcacagctgtgctcacctctgaagtgcatgagctgccatgctctcatgcctctggccctgagcatgtctcaggtgcaggtgggaggagcagatgaagagctgaaacactagggacatatggaagtcattggagccaggcaggagcttcagcacagagagtctgataggaggaacaaggtgttgaacacttttgtgaagtcaggacattaagtggtcttaaaaaggccaccttataggtactcaggaaccttgtttgttgaaataatgagtggatggtgagtgcatggatcaagaaagccagatgagaagcaaagacataagttgaggacatccttctgtcctggcagaagacatgacctggattaagtggagacattgaggaaacagaggagtggaaaggccaatcctgagctaggggcagaggggaagaactctaacaccagtgggtgtggagtgggtgggaggtgggggagaggggctcccagatagctggattgactcctggagggtgcatcagtacctcctcacgaggagcaagggagaaggagcaagttttaggggatgagtgtgtttgggatatgaggggctctagtgtctgtggcacatccaggggaaatgccccctgggcagccaaatatacaagcttggaaaggtctgggctggagacactgattggtagtcatcagatttcgttaagagctgaagccataggacgggcatcatattgcaggggtggaggaagcccatagggcctggagccatcaaaggggctggggcaaggccaggaagggtcagagttctggaaggtccagggaggggctccctggggcagacgtggtcaacagcgtgagctgtgctatctgctcaagtgagatcaggacagacgccatgtcggctactgcagcatcaaagtgcaccttacctccagaggggcagtgcacaggggctggaggcctcagtcctcaggtgggtggaagagcaagcaggaggtgagtagtggggagtgaggagaagatcccacaggagcctgcagagacggggaggctagacatgagcagaactgaggagagtaggggggcatcctaaggtgggggaacaagggggcatggagcagccaggaaaggaagggaggaggtgaggacatacgagaaggaggccattgattgaagaagggaagtccctgtaaaggcagaagacctgagacatagagaaggctgaagcaggaggggaggatgagactcttagtgaggaagtcccacctggcctgccgtgaagtggaggccaggccattacctgtgaatgaggaaagtgggtggggtctggagtctgcaaagggcccagatttttgtaatggccatcggaagggatgggtcaggctgctggccatactcagagaacagtgccaggaagccagcggaggccagagacccagccacagagcagggagtggccagagcaagccaggcccaggtggggccaggaggtggggaccaaaggaccagaagccatggcactgaagtagaaggctaagtcaggactccaggctgcagtgcaggcctgcaatgctgagtaccattcggggccctgggagagggacaaggacaaagtctgcggtgttggagctggacgtagaagaaaatgaaacagaaagcagctgagagagtagaacaggggtccagaggtctccagaggtcagagtgccagtgtgctgggccagtggtcagcaggtgagtcctggaatctcttgtgagcagtgagatgtttccagctaaaaacaaggtcctggagtaccctcaagctgggagctgaggggaatgtgggcaccattgcaggacctagtggcccagcttctctacagagattaaacatggtcagagccatctttccagcaacctcagccctgtttccctgagggcccctacgaagaaagctaatttgttctttttttatcataaaataacataaaatttgccattttaataatttttaagtgtacaattcactagcattaattatattcacaatgttgtattctcatcacccaaaacagaaactctacccattaagcaatgaaattcccatttctcctcccccagcccctggtaatctctacttactgtctatgaactttcctattctagatatttcatataagtggaatcatacagtatttgtccttttgtgtctggcttatgtcacttagcatcatgttttcaaggttcatccatgtcgtagcatatacagaacttaattccttctttttgtagttgaataatattcccatgtatatatggtatatactctattttatttatcctttcattcatggatggatgttttttaaccttttggctattgtggatagtgctgcaatgaacattggggaaacaaatgtctgtttgagtctctgccttcggtttttttggttgcgtaccttggactgaaattgctagatcatatgataattctacatttaactttctgagaaactgtcaaaatttgtctacagcagctgcacaattttacattcccactagcatcgtacaagagttccaattcctccatattcttgccaacacattattttctggtttcatttttcaatagccattttagtagtctgaagtgctatctcattgtggttttgatttacatttctctcatgactaaggatgttgagcttttttttatgtgcttattggccatttgtatatcttctttagagaaatatctgttcaagtcctttgcccctttttgaattgggttggttttgtttttgtggagttgtaggagttctttttatattctggatatttaacccttattggatatatgatttgcaatgttttctctcattttgtaagttttctttctgccttctaaatgatatcctttaatgcacagaaattttttattttcacgaatgcccttttatctgttttttcctttgttgcttgtgcttttggtgccatatctaagaattcattgccaaatccaaggtcatgaagattaaccccagtgttttcttctgagagttttatggtttaagctcttatatttgagtcactgatccattttgagttgtttttgtatatggcatgaggtagagatccaagtttattcttttgcatgtggaaactcaattgtcccagcaccatttgtaaaagagactattctttccccactgaatggacttgacacccttgtcaaagatccactaaccgtagatatgtgggtccatttctggactctcagttgtattccatttgtctatataatcttcatggcagtatcaaactgttttgattactgtagttctacagtaagttttgaaaatggggaacttgtgtccttcaaatgtgttcttttttcaaaattgttttggctgcttggagccccttggaatttataggaatttgagaactgacttttccatttcagcacaaaaagctattggaattttgataaggattatgttaaatccttagtattgaccacgaccaggggctgctacagctgtccagatgcctgcctggctagcccccagatctgcagagaaaagctgtggtggctctagggcctgtgattgagctggtcagcaccacctgccctgtccaacttcccccacctcctcccaatttgtcctcagccagcctttgcccctcaggacctctcctccagcttctctgcctggaggaagagcagcactggctgtaggtgcaagatgctgggcccccaacagcccctcctcgaggccctaatacagcacacccttcctgctccccaggtgacagccaagagtggcctagacgaactggtgagtgacctgctccaggaggcccacactgacctggaaagggtccgcgccatctggatctggatctgccatcacataggtaggcccccctgtggaatttctggctctagaatcccttgcttccattccctgcaggcctctgctcctatcagcttattcacgtgtgcagagtgacatgaaaggtgggggacagggacccagaagactggactgatgaaccagagagtaaccaaggaggataaaattcaccatgtgctatgagtctccatgaaagttagttggaggagaatcccttgcagccttctgcccataaccagtgcccagagctggaaacttcatccagcagcagccttccctctgtcccagccttccctctgtcttatctccacagagatgagagcccagagcaacaggtcatctccaagaaggattaccattggtggggagaagttgcagctgtttgaaaagtgattgcaataccagagggttcattaaataccagggccaggaaaagcgggttctccacttcctgctcccacactagcaacattggccactggtcccagcgcagtctccaaggttcttggagccacctgagggacctgggcctatgcagctgcccacagctctccacaggatggccttgggaagctcccgggtcaagcagagctgcagaggtggtggctaagggatgctgccccttgccgccttgcaaacacaaatgagagtgggcagggccagatcacgaggtggactcctagtcctttgacataaagaccagccgggtctttctcgacctgctgccactgggcttttcttttattcttctggaacaacagtttggaatgcagcttagagaatgagctcgcctggcacaggtaggaggtccaaactgaggacttgagagacccccagctcagctcccatcccaactccaccagctgtgcctgtgccttaaaggggcagggtcagaaatgggacatttataggacttcgttactgctctatccccatgccaacacacacatacacagtctcaatgggtcctcaatagctacagagacttctgccttagggcctcaccacaggcctcaggcttctttgcaatgtcttcatcccctccttagtgaagtgacaggctgtgggagagcagccttctccacttggagacgagctctgtgtgccccatgggtcagcatgaggccttcgggctgcaggaaaacgggatgagtgatttcactggaaatgtgtgcagagctgtgtggtggggattagcagagagagccccatgcctctgcactgtcctggtcccttctcctcctagcccctcctcagaggcttggggagccaggtggccccctctgccaaggcctgctcttcctctcaccacttgcacaaagaggtgatagttcccagatcccatttgtgctggggctgtagttccattcagcccactgtagtttcctggggctggtgatggccagagcacagctgggggttggggtggagtcttctcgcctcccaggctcaagctcttcatgatcccctcacctgccctatagagtatgacattgcagctgctcaggagaaggaccgccaagccttcaaacccactgacatcctgcggacccagaagaccaactgtgatggctatgctggcctcttcgagagaatgtgcaggtacgagagacaggagtccccatgctgaccaccggacccatccctctccctcttccacagtgccatgtgcctttgcccacatgccaggcctgaaacctgagtttacaaactctgctctggaacccaagtgagtcctgaaaaggtcaatttctccctttttaacaccagcataattgactttgtaccatctgccgggcttcgcgatgcattaacataatggtagatgaatgcacagagataatttggttataaaaagccctttttccgccttctcccatctctatgcagctgaaggttaaaagaatggcaggcctgggagcgggaggacagtgactgcagatgccaaggggactgtgaaaggctgtcctcagggctgacacagggagcctcttttgggggaaacaaaagatctcccacctgaaaagatttgtcagttggacagctgaatcactacgaagcggctactcttggagtcgctgggctccattttcagcactctgggagtgggcatatggccaggttgctggggtgggtgacagctctggcctgagcaggagaacaggccattgccagttcccagtgactcaaaacaggctcaagatgtggggtggggggaggggatggccactgacccccacagcttcctgagcctaccctctgaggtctgctgggttcctccagaaaacagtcagctagccctggggccatcaaagaacccctccccagggggtggatgaacagcggcccactgtctttctaggcttctgggagtgagtcttcttaggcacccagatgtcagcccaccagaactgcaggtggcaattcatcaaaccaagtgtaacacttagtccacaggcaggcagttgtgatggcctcagtgttgcagaggcggcagctgccgagcactgggtgcatgcaacctattcctggcccaaaccccctgttgtgctgcctcctgcccccatcaccactgccaagcacaggcacctacccggctgctgagttactctaagcctcctgctctgcttcctgtacttcccttttctcactttcaaggccaatccctgagaccacagccccagacgcagccacggtgggtcagggtacagaatatgccacccaggctgcttcccaccccctaccccagacccaagcatacctcctgctgcctgcaggcctctccaggaacctggatcctcactggcctctctgtccaggcttccctggtcctgggttcctaacatcactaaaggatcacactatctagcaaagtcctccaaaatctgacctcagccaagtttccagccctgcactgtgtgacaccaccttcctgaccacctctgcatgcacacctgctccctctccccagagctccttccaggccccgctccaggacagcccacaaccttccccttcctttgtacccccagcccagttgcacaccaaactcatgtgttgccttatgctttcaattaataacatttttaaatttaaaaaataccattcattgtagatggtttataaaatgcactaaagcaaaaaagaaattattactctgaatctcaccacttacagctaacactggtaacatttggtcatattactttccagactgtgttctgtgcatacaggaattacctgtgctcggttgttgtcatacatcctatcgattgtatacgtctatatttgcctttatctcctctctccttctacctcccctgcgaatacccatctcagaatcctacacccagtaggccctcaatagacatatatagaaatgacaggatattcctagcagacttatgtggaatggaatgtggaattctcttttaactgatgaaatagccacaagtctcttagctccatttgtgcctagcatctttcagaacatgattattttcctctgattttacaaatttgaaaaatgcttagcattttttccaagttccaggatatattcctctttatccagtataagctttctagcatactgtagaaggaatgccagatttgaagctagaaagacctgggtctaccacttagagtggtatcgcctccttgatccagtataagcatcctagcatcctttagaaggagtgccaaagttaaagccagaaagacctggctcccagtttttaatttaccacctattagttttgttctttgtggtaaggcccttaacctcttgcagcctcagtgctctcatctatatattggagactagattgcctacctggcagggctataggactcaatgagactgcagtttgggggttaccaacccgattttggggtgggtgttttttgacctatcttgtctttcttgagtattgattggagtccttttgctctgtggagttttcctacagactctgccagcctacatagattcagaaaattgacacttgccttgagtgaaactgtcagctttttgccctggtccagatacttaacaatggccctattctggcctgcagcttatcattaaaactctccctaacattttgcatcatttaaaattagttccaacatggtgattaccatgtgcaaaattcctcacactgcctgagatgtgtagcaatagctcacggtcccctgaattcctttaactgtttctttaaagatcagtaacctatctatgcatccctctactaactctctttacctttaaaataactgccaaaagtttggtaaattaattagctaattccttaataactgaggacatataatccgcacttgctgatttatcccttcttggttgtcagggtggacatcattactttttgccagtccattccacctccctgaaattgtctcattaaagactgatttaataaagtaatttggggaggaattcagatattttcacaacatcattcagttccttctgtctgtcccaagtcactgatgtggggttttttggttaatgctatagcttgtaactgctggtccagtttccttctgactttctatcatccaacattaatgtctctctttttgcctcagttgcctgcatccttagttgattctgcctaatttcctcgcaggagccaagcttaattccccagactgctgctcttgagtcggcctccagtaaattctcttcccgttagcatggctttagcatcaccagctagcaggtttcagagacgttggataaagccaggcacttattacgagtttgagccctgacactgagggagttggttgtcaccaatcagatgtcagctggctttccactcatcctccagctgtcactgagagcaggggcaggagtgtgtgcagtcagatggctgcttctggttagcagtatgtcccctataatcctaaaacatcacttggttccaaaggccccaaaagataggcagtggccatctaagccttctgggagatgcagattcattggataaccttaaattatcaccaaatctgatgctggtgtataaggcctctgaaagggacatcttagctcccccacccttatagctacaccaaaggatggcactcacaaagatgagttatgtcactggtgcaaaccacctttccatttcactctctataccacctacaagtgtatagatcaaaacaaaatcttgatttacaaaagagctggtgcaacattgtgcacatgtatcctaaaacttaaagtataataataacaaaaataaaataaaataaaaagaaaaaagaaaaaaaattaacttaccatgtcagctatgaggaatatgaggtcaaatgatttttccattttcccaatagatgttttcacacgtgaaaaaaaaaaaaaaaaaaaaagcttcttgaactatgcatcaggacaactgcatccactgctgctccggccactggctagctgtgtgtccccaggcaaggcagcctctctctctgaacagctgacgcctccctcaccttcagagaggaggcctctgaagtcacgtctcatgaggttctgcatggggccctggagagagaattattatcaagattactagttattgacgtagctgtaagggtagtgtgtaagaaaagggaaaagagagcacatgggagaaatataaacacactgtcagattataagaaatcaagtacataaattgtgaaagataagtcatggtttgtttgtcctgctgcagtatagaaaccacagtattttcaacaaaataccaaaagaaaagcatacttcatagtctctcctacaggcacactccctccctttttccctcacttggctcacacatcctaggagaggtgatcagatttgggaaagtctactgcggtcagagcccattggtgtagggtgcacctgtccacccagatatttcagccacacagctgttggggcctggccttggtactgactgtaggagcatcatacagttcctatggcagggcctggaccatctcagtataaaataataccaaattaatacactaggatacagtgcaccaaactggaacacacagatctttttaaataataaggataatgcattcatagaagactcagcagcttcagggttcatcaagggtaacccaggtaatgacattgccttctgcttggctgcccctctgttcagtctcttcccatcaggccacatttggtggccatgtggtcctttgcagcccttggggcttctctgattgggtccctgagccctgatattgctggagagtgggggctgcagctttctccaaatcctccagggtgctccttggcagcttgttcagggcatcttacatccatgttttcattgtggcttgggatatatatcagccatgagctatggaggcaaaattgaggttgtcaattctgtaaagtagaagcgaagattctgcagtctgaggtcattaaataaatctccttgggtgatattttaggctctgggatggctggtcggagctcttcaggaggtggaaatgtttctagtcctcggcccctccttccgtgctctctcagctcctgcctgcaaagttaattcctccacctttgggctctccaggtctttgcttatagactgggattttataagcaaagttctggagacagttccagtgacagttcccatatccaccctccttccaactatcagcacatctagggcagccactgagccttattttggggatatgatatttttttatgttgttacattgtgttgcgttgtatggtgccatgtcatgttatagcattccctgctacagtgctttatacacagtgtgtgcggccagtgatcttttgatgacatgaaagagttgtggttcatcctggctagcaagagtggctggagacaaaactcctgtgggttccacaatcatcgtcttatacatacagaggattttgcatgagaattatggcatattaacaataatgctttacattatgaccttctttgtccaattcatctggcacattgctgccaggtaataaaatatcctcatatcagagtcaagcatggcataagcttataactgagtttatattttcatcttttttctgccccaggcattccccacagccttcccagcttctcctcagcctgtcagagaagaatcaacccctggagatcatttaatgccaacatttctctctgcccatgataagcctggcaaggtcactctagaggtgaccaccagacctgggaggtgaccttatttcctggctcaggggccatcacccccactcagagcagtacaggtggacatccctgccccttgcttcttcctcctgctctcctttccagggctggggcaggctctcgctgctgctccctgacttggtttttccaatcttgcctccacttcactcccttgagggcaggatgtccccctgggcacacggcctaggacatggcttctcccaggaggacattccatacccattctgatttaccccaccgcctggaggctgcacaaatgctaaattcctctccttccttccttgactccaggtggctctgagcagaggacaagcatcagtgggcagcatgtccagaggtccacagcgccgctaaatcagttcaccttaatgcaaaacgagccattctccaagccccattgttcccaggactccccttatccctccacatcatcctagaaagtgatatgcacagacattctaggcagcaatggaaagtaatttcctgaagaatataattttaagtagtatttatggctttttttccaattctcaaagtaacacataatcattattaaaaatttagaaaatacagagaagtttcaagaaaaacattaaaatcacctataatcccattgccaaaagatcaggtgccttttgtgccatctctccccctctcactccctgcccctccttctctgtgcatgcaggcaacacacacacacacacacacacacacacacacacacacacacacagcatcggcgtgacattgtgctgactggagagattgacatgctgttgtcagttcacatcgtgtcaggggcactgcttagctcactaaatatttttcacaacatttcttctcctcacccagtctctgagtagatggggccccacctcctatagaatgtctatcccacccctacacctctacccactcctctggccttgctttcctctggtccttctctgctagctgtttcctctcagactataaacacatccagacttcctcatcctgagaacaaccccctcagccttgcatcccctcagcactccccaccaccttctgctctctgcactgcagagaaatgaggagagagcactccaggtatgcaggctgccccttctccccttccttccacggtctcctcagctactgcctccttctgccctggagtggcttatggcctttgccagcagaaaatcacaacactgggatctagtttctcttgcagtctgtccccatgccctcaagtgctcccagaagccatcccacagagccaagctggtatgttcttatgggattccttagagggcttaggaggcctgaacctccttttgtgaagcaacaggcaaaagggcgggggctagaaaacttccaagcccctaaggaacctcagcactagtggcccggactttccacaggtgagcagaggttaaggcagacatggtaacacctcatcattgcatgcatgtgaagaaacactgatggctgggaaagtagaatctgttaaccctcaggacatcacatttgatcccaatgactctctcagcaagtgatatgtattagtaatatttaatccaatattttgctaattttaaattacatgttcatttttacaaggaagattcccccaattcctatagtagatgcatggccatttcaccccattcccctgggaggctccgtggccctcttgtttagagcaactgaggctgcagccctggtctgtggaagggcccagccccatgggcccatctcactgaaacagaccccaccaacaccctggactgcagactcagctcagctgagtacagcacagggtcaccactgagttggggactgagcagcttgtgtggtactcaaaggagccccatcaaaggggcatcaagcacatcctcggtttcacaggttgtgtatctattacaccaattttccatgagtgcaaggaaaatgtcttgaggaaggggaaccttttctaatttacacaaaggccctaggagggctagcatgggatgtccctaggtcagactagcagtgaaattgtctgcacagtccatccccttggctgtcctcaggggagcagggctgctgaggagcaagaccagctggccatgaaaggacacccaggggtcttgctttggccttggactggtgcccacagcccaggcctgggcctcagggttttagctccaaatgtctcattttatatcttccccagaggtgacccatgcccatcttcccatccaggttcccagaaagcagtgccagctctactatgagcagtgaaggagcacaatgtcaaaaggaccccaaagctcaggttgactggtcggcatttccattcccctcaggacagccacaggagactccagaattgtggccagggcaggcagtcagcaaatgaccttaatgcaccatgatggctcttgcaccatgttcacaaaggacagacccaccagtcagacctgagcaaactggcagctggccagtcctccctgggccagggctggagacatccaccgcctgccccggggttcccctgcaggcatccttgggaggaatagcaggggggtagggcttggcttctgtaccctcacaaccagcaaccccacaacacctcacccatgtcacgagacccatctcttcagtcgcatgtccagaagcgccctggttctcccagcagctgtgctcgccccttacatgtaggttttgttgcaggaacattgtcatttcccctgctcctattttcttgaagccagcctcacgcttgcccccattttttcctcctgaagagctgcttgaggagcgtgtcaagcaggctctagggatgaacatttcagaagtgatctgaatggtgttggtctcaggggaggagcagacagcggagactgcagccagtctgtaccaacaggaccagccagcactgtatctccctgtccccagtgccccgagataaaagccatcaaggctgtttatatgtgagtacaagaagcaaggaaaaggatagacagggaggactgatgggcagcaaacatgcctgaaacctgagaccatggacagacttggaggcaagccacagcgggatccccctctcagaccccctgtcctgcccccaggctcgccggagtgcagtgtatgaccgtgcctggctactccaagggtttcggctaccagacagggcagagcttctcgggggagtttgaccatgcctggaatgctgtgtacctggagggaagatggcacctggtggacagcacctggggcagcggcctggtggacaccatcacctccaaattcaccttcctgtaagtacttgtctcagttctgctgggcgtctggcaggtggaagtggaggatgtgccaggcagcatgaagcagcaggtggagaagaccaagcgggaggggaaggagagccaggaggccccatgcccactcctcctcggctctgaagtgggctggctccaggccaattgtgagggcccagacccttttgtcacctcaccctccactgacaaactccccactctgactccctataactccctccaccaaagcactgaaagcctgcagcatttgcccccagaccacacatgaggaaaggtgggctaatagccttctttagttgttggcaggttcccttccagactttggccattgaccacattaccaggcacaaatgccagaatgatctcttactgctttgcccagacaccaggctccttctcctctcaggtctgagtgagaccgtatcacatttctgaggaaagggctgtggtttttggggaaggggtgctattggcggtgcagggtcactgtgaggcacagtggggcagggcagccggggtgcagaggactggagcatttctgtcctctggggctctggccaatcctggccttaacctgaggctacatacaatattcttcatggatcatgatgttatcagcagctcagattcctttttattcagaaacatgagtgtgctctctcgatttttgcaccttaaatcttgacactcccacacatgggacaaatacaagccatgtgcacacacatcctacacgcagggctcgcgtactcacagataccctctttacctctgttattctcaacactgctcctcttaggcagagcaaagccacccccatctcaggaagggcctctctgttcttctcttgatccccattactgacatccagagaggcagcactccagtcggccctggagagccacaaaaggtccccgccagcacagctgcacagcacagaaacaggttggggtagatggaggcagtgaattcaagcactctgtctccctgccttcccacgaccccactgcgtggtccacaggctatgcctttcccccctttgaacttctgattgtctttgagcatgaggcagtcagttttcccctcgacagcctagggcactgagtgcagaccacagttgcaggctgtggccttcccttagaagggacctcagaccctgccttgactacaatttctggaagcatccactgaggaggagtctccagtgcccatgttagggtcggagatggtgcctcttcccatccagggtgtccataggaccactccggtgggtgtattgggcccctgcctcccctgcatggagctggctgctaaccagcttgtctctgctccagctacaatgagttctacttcctcacccaccctgcactgttcatcgaggaccacttcccagacaacaagaactggcagctgctaaaacctcctcaatctctgaggcagtttgagaacaacatgtatcacaagagtgaattctacaacaaagggatgctgagtgcccacccagagacttccatgatcagaacaggtgagcccggagcaggtgccagtgtgctagcagcaggaatggagcatttcgcactgtcctccaggagcccgcctgagactgcgctttcaaggcatgcccttccagacgcatggcttgtgagcttagcacaaagcttgtgtgtgcatgtggatgagtggaggctgctgaggcagcccaggccatcagggcagggaagggccataggccacatcagcagggacaaaagctcactcacactagcataaacccagaaagggatgtgtctgaaggctgcaggtttcctagaacttgaaggctgaacacacagcctggcatgtcacagaagccagggctgggcacttcctagctgggtgagtctctctcagttcacatagcagggaaaaggactacgtcaccctggctacacatagcctctgggctcaggtccccaacagaagctactggcctgctgtgttctcttccccaactcctgctggagagaatacatggcctcagcagagctggaatctgggtgttggtggtccaaccagcaaggatggggagcaacatgggtctcccaggacaggtgggggcagtcccacccaagacagagagttggggcagacttccttagggaggtggccactgagctgggtcttgggagaggagaacaggcctagtagctagacagagatggacatgttctaggcagcagaggagaggcggggacacagtaagcccccagcctccaaactcaggcacccctggatgagggccaagctccagcacctctgcctggctggctcagtacccctcccttctggaggcgggacccagccgtttccagcccactcccctggggcagtataggatacccagcttagccatctcccatggctggcctgggctgacatgtgctctcccaaccttcaccacggagccatggcagctgagtatgtttgcacactctgaggcatacgggggctgccctggagggccagaactggtcacaaaaaagcagggccttctctggaagattgtctcttatgcctctccaaggccttggcacctgatccagtgctgggcacacagcctgggcacgctgcacagccctgtaagtcgggtcagtccagcctcccacacctcagcaaaggactgcctggtggcaccgtctctgccactggggcctccatccgcccaggacaggaggtctgagctcacactgactattagcacagggtgcctgtgggtgggcccagagcccctggggagctccaacccacattgcagggcaatggggcagcggggagcacaggtgtccccaagttagttccaactgacttgtcccttccaccacacaatgacttcctttgccaagttgctgagctcttgcaaactcttccaactccaaatacctggcagctcctgcagctaaaataacagcgtgaagttgctcaatttgagaatccatttcctgtgcttacaacagatgcagggcttgttcaatgtatcataggccgtggaaatatcggaaagaactgaccaggtcaaagcaacaccaaactgatgtcattgagtggagtttgcctttttaagagacataaaaatataaacaccagattccttaatttatagaaatctaaacctaaatatgattccatatatctgatacttatgtacagagtatttctttgtggtagctagttctgttaagagaggggaggggaaggaaacaaaatagggaaactgagatgagcagaaaggaagggaaggaagagggcacctagataaggggctggaaagctgccaggctctaggagagtgccgtggaggggagaggggaggaggaggaggaagaggggactggaagagccgtggactcccatagaggtctgcaggggtggctagtcctttatttcaagtcttcccagtcattcaacacacctttggcaagaaccctctgggtgaggcaccacaaccaggcactaagacgtggcaggaaatgaaacaggctagccccttcaccacagagcccacaggccagcaaggagttcggacactacacaaaaatgatcacatgatgaattacagcagtggaacgttccctgaaggacagccagggctaggagagaagctgccagggaactcagcctcagctgaggggtccgggtgggctgctttgccacggggacattaccatgaagccttatccaggtttgggggaagtggtggggagggaggagagggtaggaggaacctgaggcatgaagggttgtggccttggaggatctgagagagtgcttgatactggcgaggcaggaagagacaggcttctccacgggtctccagcttgagggctctgccgtgagcccaggagtagccaggtggacgttttcaaaggagccctggggctgctgtgtggggtgctgggtggtgctccacaatcaaaggtgaatctcagggggatctgggcttcactgtgcagaaaagactcacagccagttgtgagatggaacaggaccaggggccgtgagcagtgaggagctgaggtagcttctgcccactgagctggttcagaagtgaggggagaggagggttttcaccaagaggggatagcaactctattgatcttggtcactttcctttggaggttaccatgggacagatgtggcatgcagtggctgaaggcagtagagaaagcatgtagacaaataaaatagcatgaaagcaccaagagtcacacaatttcagtgtaacagaaggggaagcaatggcattggagttaagcagtgctcagagagtgggatgagggccagtcctcaaagagtgggggtcgcaaagaggggagagtactcagaggaaggcgtggaggccagcagcctaggtcctccaaggtctgagaggcctcgttattaggaagtcactggagggtgggggcagagggaagtcactgcagtgccagagagctgaccggcagaggggaaatggaggcagtggggggatgtgtgggagtgtagggcaggtgcggagtgggcagtatgtgacagggttgggacagcttttgagctgggacagccacgaagaaggtagaggggctgtctaagcagcctccccatcatgctggcccatgtggtcttctcccattcctgaggtgggagttggcatggaatgcagattcaatgagaagtctattaaggcctttgtcctagagcccaggcacagtgttctgcctcccctaccaagagtccaagctaggggaaagttcctagggacatggatcagacagcctctctccttcctttgcactcaactgtgaacggggctggggaggttgctggggctgggagcagatgaccagcttctgagagaattaagaccaggctctaagagaagccacggtccctccctgtggccctggaagccaggagggaccaggcaggtgggtcctcatgggctacaaagactggagaactgaccacctgtccctcaaaatcaatgaccaggacagacgaagatgaaacttcagagcaaggggagagatggggggtggcagtgtgggggttgcaaaagaccctcctgtgcacacactgactcttcaggacccattcctgaaacatggctaagatacacctatgtgagaagcatggggtgggggaggtggggatcagggaactgccccaccccaacctcctatgcacagtctcagggagtgaagccattctcactagttttaaggacaatgcgttgacatgacagcattgacacttagacagatgctacagggagcaaggtgcaagctagacctgagacttgggggagatggtgcccctcctgacccatgaccctctctggacacaggcaaccttcatctaatgtgaatcaattgggcaggatgcacacatacagcttgggataaatttttctagaggccccttagctttcatttctctcaaagaaaaccacctgaagggagcagggaacccttccagcggtgtgctgccgctggctgatgccatgctcagtgaagtcatattggttgcttgaaatggactgtggtgaaagtattaacaccgtggaaatagacaagctctataagtcaggacgtttttctcccagggagacagttgttaaacatttaccagcacatcagcacgtgctggacccatctctgctgaccctgactttctctcctcagtgaatgggaaggccacggtcaccattgagagctgcgccccgacgctgttcatgttcatgctcaatggcaagcaagagcatgggctgctgagcctaaggaagaatgggatgaagttggaggtgtaccctccaaccatgggcactcacaagctgcagatctttgccaagggcaactccgacatctacagctcagtgctggagtacacgctcaagtgcaattatgtggacatgggtgtccagctgcctgctgagcttcaccagcccgtgggccccagctggttctcggagcagatgggcatcatgaagccctcccaccctgaccctatcatccacaccagcgacgggcgctgctccatcagcttcagcgtggaggagggcattaatgtcctggcttccctccacggggatgatggccccatcactgaggagacacagcggcgctacatcttccagctgcaccgggagaagcagaccgagctgaaagtccagctgccccatgcaggcaagtttgccctcaagatctttgtcaagaagaggcaggaaccaggaaactacatcttcgtctttaattaccttgtatgctgtgccaacaccaaggtgaactggcccatgttccctgagagctttggcaactggggacaggacaatgagctgctggaacctctgtcaggtgtgcttcctgccaaccggaatgtcccattcaaattgaagctgcatggtattgccaaagtcctggtgaaggggcaggacacatggcccctgaccctgaaccacgagggctactgggagggaagctgcagcacagctggctgccaggaagtctatgtcatggtgctggagaatgccaaccacaatttctactcctacatcctgaaatacaaagtgaatgcccagtgagggctgtgccccggtcttaccctcccaaagggccaaggccagacctccccagggagggctcgaaggaagtgcagggagccctggacaccactgagtctgcatgaaatcccttctaggcctctgcctcagtgtcccacctctgccacaggagctgtgatctttgtgttctgaaggcttcactcaggtgtggctgtgactgagggggcagaggcagtggctctttagaaggaaaaggtgctatgtaaatctaaggtattgtaaactgtacacctgcatccagatgccccttctcgtattagtgctgctgctgttgttgttgctgtagggttgatgagggaaagcagggatattgcccaggttgacagcttttcacatgatgcttagagaattctcttccatgcccaaggggacatgatttgcaaggctgggttgtccttgaatcacagagcccctttcaagcaatatcaccgtgcctctcgacagctccgagcccccagggaatcttggactatcttctcctcccagacctgatcatcttctgcatcctgctgcctcttcattagctacttcttgttcttcaagagcccaagaaaaagggtgtggtgaggaagccagctgacccacaactggctggaagctgatcgtctccaacatccctaagtatagtcaggaatgtgacaaccagaaagttgtgaggagactgcaaagcaaagagcagcccatgcccgctgtggctgtgcaggtgggagggacactgtcggcagagctgcagccttggtctgagggtgtaagacctccagctctgctctgagaggagtacacagggcaggtagttcagtctaaggcctggagtgccctccaggccctcacagagcctgggcctcaggcccctgccccacctccacagagagcctccagaggctggccaggcccttggggagtcttgtggatagccctgaataaggacctgggcgcagatcaggtgagtagtgcagtgcggcaatgccgaggagactcacactttaacagggctctgcctgcccccagtgtctctaccagcaaagccagggctgggaagaattccagctgcacgagagcagcttttgtgcctgtctcggagaaaacatcctatcccgtctcctttcctcccttctctgagaagacagccccctccagtctcaccttgcatggggacagctcagggctccttgcttgctcaggcacagactgagaggcctcagctgcccagctggccctcagcagcgcctcaggctgccgttgccatggcaacggaggaaaggctgacttcagcgagggcagataagagggaaaggcgagagaggccccacatggccactgcagaaccatcctggcacacagacatgctccctgctgaactcccggcttctccagctccgtggcccctggctgtctcagtgccccccaacccctgagagccagcactgcctggcacctctccccacagcccctccacaggcctccaggctcaaccacagccagggccagctgggaccctcatagcttcctccgtggcactcaccctcacatccctgtatccaacaaatgctcacagaagtaccagatgcttgggctacagaggtgaaccaagggggcccggcccctgccatccagagtacagggtgaggaaactgccaggcagcagcagccttccctgcccaggcctgactgaagatccaggctccagacacttctgttcattatcccccgggatccctcccctaaaagtccccactgccacccagcacggtggcctagcccagaaccagctcacaagggtgcccatcatccaacaggccggcggcctcgagcaaaaggggtgtctcccctggggggctgaactgtcctgggcaggtcctgcgccctccgcagtctctgccaccgaggccacccagccagcctcgtgtcactcacacctgaaaaatgcacaaaggccccggaggcataacagctatgcaccaccacagggaaacaaagggagttttacaccctgaaaacagccgtcttgcacacttctgattttatgggcttaaagaaatgtgtttgtttcatcaaaacaataagtgccttcgatgacgcatgtcactcactggaccccgcgctggctgcctcgcttagtcctgctggagacccccataccttttcgatatgcaatataattaatcaatacatcctggagcattgcagagaatgccacccagcaaaataggagctgtccccagcaccagagagggaggccccgcccctcaaagcaccgcagggcatcagcaagcccctccctctcgtttaactaggcaccccctttgtaaagacagctgtaggcgcagtcagaaaatcacctgcatttctttccactgaagtaaaaatacatgaaatgaaatctaatcttcatgaatttttacacgcatgctgctcagggtagacattcggagttgcattttgaaggcttttctttaaatccccatctttgtttcccgggcgacgagtcccagtcgccggcggaatggcacgggcgcccccaggtgtccgaagtgcggagctgccggcgctgcacaccgcgaggctgatctatcaccgggctttttcgcagaacttgaaaatgctgtggaaatgtttatgttaaaatcactaggtgctttctcgtggcttctcagcgctaccttatgtgtacacggaggacatctttgtcacgcacaagctgtgagggcatcctgggggacaacctggtgtgttgaaaagacaagggatgtgatgggactgttttgcctggaaataacttcttgaaacagaagcacttgacataggactggatggaacagctgtgactacactcattactataccattgaaggattggaaccgatcaaactcagaaagtatctgcttgcaattctcaggatggcagcccccaggccacagggcagaagggaaccgagggtggaggagtggtgggcagaggcactacaaccacaacttcagtacacttctttccagcttgtttcagaagtgccatagctcagctggactccattttcaatctgattatgatcattgtgagttccccatatgttacattgtcctaccaggacagcctcctcactgcctgctaagattaaaagtaaataaatagactaactgaagcatgaaggatttcggctagacataaagaactatttcctgttgttaagcaggagggacaagttgccaagaaagtttgtgaaatcctcttctcaaaggacttgaaaaggagaaaagttttcccagtggtctgaggttttagatgccatgttcactagaaggagtgggttttctcctctccaaaccaattaattcctgagatatcctggtctgcctgcagcaaacagagggttaacagcatcactacatcatttgctattggcaaaattttcgaagatggtgtgcctctattgcccgcctcagtttatcttaggtctataatttcttttcatttggagtaagtagtcggcaattgaaagaggtgattacttctcataatgtgtgcattgagttgtgtgggccggtggctgttgagtatgctttctccatgttgttgctggtgttgtttttcaataaaatttatattcatttttatccaacaatgtaattatcgattcattcttatcatgtatctcacaaggtgggaaatggagagaaacaggaaaaatgctttcatgttcaaaggaagccctagaaaaaaatcaatgtcccagccagttgaatgcgacggtgagatgcgaatggaatgtcaggcaaatagctatttcacattaaagaaaacataatcaggttagctccagccactctatggttcacatgcctttgaagaacacgaaggcactgtttctttcattgaatcttgtttaacttgaaaattttaaagtcaatcctaatttatttttacagtgggagaaaaaaaattaccaaaaatgcctatcagcctacttttcttttgaatgtatataaatatgtacttcttgatattcatatacatgcagaaactttccagccggtcacctaagcagattattcataaactagacatttagagaaatacagaaaatgaaaaatccagacatttctgagaagctgctgtaaccatggagaccattctcgtagctgtagtgtgaaggacaaaaagaacttgtgttcccaaatctggcttcgtcatgtctctcgctgctagatccacaaaaacgaggcccagcatgcttctccttaggaaggagacccggcagcatattaagaggaagtcagaagaaacagtcttccacacaaaagaaggagtagctcttgagttattagaacagtctgaaaatgccatccccaaagctggagtggatgacctccaatgtcccttccagtccggagagtttgtgatgccgtgtctctgtgaacagatgctggcaggcagtgggcctggggttgtcagttacagaacatctgaagggccctgctgtggaacatctgaagggccctgctgtgttaagagcctgcccctggagcccctggcagactgcactgctggctcctctcttgcctgagggcaaggggctggagaaagcccagcagagggaccaaaggggaagaacagcctctgacaggatgctggttctgtctgattttgcaagcagaactaaaggaaactgaaagttaacggggatgtcctctttggggtgtcccacaggcatctccgagtcaaaagatgctaaactggagttacttctctccctcaaattactcccaactcctcctgggtccccagttcagtaaatgcatccctatccaaccagataactaagttagactcatggcagtcactggtgatgaaacccagtcccttctggatgtgtctcacctcccacctgctctcccaactccaccttctctcctttcccacgacctgctacaaaccaggtcctcatgatctcagctatactgtttgtgtcttatactttccatggggagatgaagcctcccggccctattactgtccacaatggcctcccattcatatattcttatcacactaggacgatagggttgttaagacaaggtttccaagaaatcctttcagaacaatctcaccatctctggaaagacataattggtattaggcactagcgggaaaggcaggtcttcaacaaaaaactggtttttatagggaatcggaaagaagcactgtctcctttttctctaaagagacaaggtgccaaggccacccagtcagcctcgtgtcactcatgcccgaaaaatgcacaaaggccccagaggcataatagttatgcaccaccacagggaaacgaggggtgttttacaccctgaaaacagcctttttgcacacctttgattttacgggctgaaagaaatgtattgtgtttcatcaaaataataagcaccttcgatgatgcatgtcactcgctggaccccacactggctgcctcggcctacttcactactgggtgagggtatgcagggtggctcttcgtaccacagccaggcgggggactcaatggggtgcagaggtggagccctacctgcaggtaaacaagctccatcttgaagccagactctccacatccatggcttccagcttatttccctcctgtcctcctgcaccaacagcagcacagatcatatgttcaggtggaccagttctattcccaggagaacagatgctgagacacagtaggaatgtaaacagtgtgctggaggcaatacctgtggaagttaaaagggaggggggaagcaggatgagtcagagagaagctcagacaatggtgcaagtctgaccaagtcccagccaacccaacaggaagttccaaaacaaagatttgtattagaagagtctggagctgtacagaaatggccaggccctagagaaaccatcatgctcagccacttgctggggctgcctggcaagagcttggcctcagttcaaaagctcaggcagaccttgaaggtgctaacacctggagtctctccgcgacctgcactccttgcagagaatcagcaacttcttccagaagggagacctgtgcagcacacacaagttaacttgcctatgctatggagggttcaggaaagactgggtgagggttctgtgtgtgcagtcagcatacccaaagccatctgggatccagcaatcactgaaaagtcttcacaagatggtttgtggaagggacagcggcctctacataggagaaatatgtactccaagggcccactttcaaggtgttgtggactaatttgatgaaaggcagcttctttcttatttctccttctctccctcttgcccctgccatccagggaagcctcaacacaacagccaagaggatcgctccatgctgcactcttacttaaaaccgaccaatggttccccattgctcagggatgagactagacccccactctggcctcacactgctttctccactttgtctcccatcactctccctgagagccccttagaatcatcaaccatgtgacaccaggcagtccatgtacctcccaccagcgtgctttatacatgctgtcctttctagccaggacgtcttttcctgcctgaggaagccctgcctggcctttgtggatcaggccagcccaccactctgtcagaccttcctagtcctcccactgcccaagccatggggaattatctgcctatcttccatgttcatgtcacactttgttgctcatctgttaacccagaaccttctacaagattctgggattcaggaagtacttggaggttctgcccctaggatgtgaattccttgaatatatatgctttggttctgctcctcggcacacagtaggtgtttggtaaacgcttggcaagtgtttcactgggaaaactaagacagactaggaagacagggccaggaaagtactactgcctagcagtccataaccatccactgagcatttgtcaaagcatgttcccatttcaccaggtctagcccttgtgtttttgcccaactctgtatgccacatactggacattgaggaggggaacccaagattctctcagaggagggccacatcctggggagggctgggaatgtggggtgaagtaaccaccctggaggaggctgaggatgcagctaacagtggtcttcaaaggaagaggccctttaccaagtccagcatctaaaagaggacacatactgactacttggaagatagaacaagtcctgaaagtaggacttggtcttgactagagaaggatggccaccctgcctgtaaaggtgggtagcagagggttgtcaggcattctttggctgtgaacagttttaatggaattttctttcctttatctagatttgttcccgctccaaattttccccatggccctgtttgaagattatataacctaagcttgatgcttctatttaacccagagtgacataaaaatttagctgagggcacctgctgatcccattcccacccacccacccagagaccaacaaacaaacctttccacgggaaagcttctaaagccccagaagaacctgttttctcgggaaagagctgcaaaatggcaaatatagctatttaggatctaaaggcattaacatcttctacagcaaagcctgagtatgtggggctgtcttgaagaccgttgatatattggaaagtaatgctccagggaacactcaaactcatggtttctttgagcacagttgtcctcaaggctgatcctctgaagaggagcccctgcaggatgaagtgtaaaaaagacaaagcaccacgaagtggtatccagtggtatccagtgtatccagtggcaaagccaagccatgaaggattgagaatgagaaggccacctagacagggcccaccaagagattccctctctccaattaaaccagcactctagatgtttagtcatcattgccaggggtactgggtttagacagattctgaggccacaactgggttcactaggaaagagtgtcatgactagctagtgatccatagacaatggattgaagggtgaggtgtgccatgtatttgccaatcccagcttaaaggtagctaaatcagggctcagaccaaaataatgaaggagactgtttagtccgttctcacactgctaataaagacatacccgagactgggtaatttataaaggaaaaagatttaattgactcacagttcagcatggctggggaggcctcaggaaacttaacaatcatgtcagaaggggaagaaaacacatacttcttctcatggcggcagcaaggaaaagtgctgagcaaaagggggaaacaccccttataaaatcatcagatcttgtgagaactcactcactatcacgagaacagcatgagagtaaccacccccatgattaaattacctcccacttggtccctcccatgacacgtggagattatggaaactacaattcaagatgacatttggttggggacacagccaaaccatatcagaggctattcagaccagtggggagcactggcttcccattaagctagcccatggactgacaaccagtcagctttcaaaccaaaggtcccaggatgtgctgggggcctcctgacctcacctgagctccaggaggattccacgcaacatgcatgccacccagctcagaggacacaaatgcacacaggcatatcaactctagggagaaggagcctaggctgagtgtgtttgctcttttatctccatgattaaacagtgccttgcatttagaataagtgatcagtaaatttttgaagtgaacattgccttgtcatttcaaaaacaaaatgatagatctctgggttgtttacatggctgttgaccaaaacagctgttgagttacaacatcctaaatagtcatttccttcttttgctcaactaggaaagcatatgcacagcagtgtactcctttgcccctgtgggaaatgtatatttacaagaggagaaaaattgccacctggctgggagtgctcatggtgtttgcctctgggaaacaatcagtgcatgggcaaccaatcaatgggaggagtgccgttcttctcgggggaatccgcccgccctgagcatgtgccgagattgctttgtttctatcagggggaatggctgactgcctctgtgacacaacgaatcagccatcatttcgccctggctgtgcagggaccaaggcagtgacgtccccctttatggtggcaggggcagctatggagaggctggtggcatgagggcagaggggcagccacaactgtgagtacacaagaacagctgggctgaatgactgacgaagtgcagatattaggagtggggagcccctggcagctcccatctgggtaaaggatggtggtgaggaaaaatgaggaagcgtttatttagaacaaaatgacggtgggattacagatttcctagtgaacactttgctcatatttatatttgtatttgaatgtatgtgaacaccaaggagatctggaaattaacatccaccattttattctatttaaaaagttaaatgaagccaagatactggcagcacttgaaggctgtcccctcctcctatgccctttgggatagccccaccctagggactgggcaagtgtgggtaccatgaaccttttggcattcatttcatgagtatcagatccccttctccatctcccaggagcaacacagtggagagaacacgttaacctgattgtgggagggcatccactctggcagtgaaagcttcacttgacatttttaaagctcaacaagagtgttaaagtctatctttaaaagaagtgaatgggcttcctctggaaagatggcctcttagccactggtcccctgttagactgaaatctgtcttgtgtggtcaggagccattaatgtgtgattgaagcctcgagttttcctctatacacattgatttcacttggagaagccctgtggacccctcctcctcctcagcgttggcagtcatgagcctggggaagcctgtggctcagcccctgtttgacagcaggtaggagagtgtgccagctaagagcacacacctggagctgaccgcctgattcctaaccccagttctgccagctcccagctgatttgtgcaagttactgaacctccctgtttttgtttcctcatcagtaaaacagggatactcatagcacctactgtgtacacttcttatggggattaaatgagctaacatatggtacaatgactagaaaagtcccgggcacatagtaagtactcagtaattattggctaccatcacgatgcatcagtcatcatcagcataatgaggatgacactgatgtattgttccctaaggaatccaaaagtctcaagcccctcataaaattgtggcaatcactgatttcaatgcagaaatcccatatccaagacgcaatcacccagtctttcctagaatccttccagggaccaggagctctccactccatgaggcagctgtccattactggacacctatgttaaggccttacctatacaaaactgccttaaattagggcagctgagccaatccacccactgggctcagtgagttgtctattatatgatgggacaaccatgtagtgggagcccggaatcaccagtacaaagcctggctctagtctgagggttccggggactaggtaggagcaactgcaatatactcagacacggaagggagccaaaagagcagatgaaaagaaaaagaaaaccttccactcgagagagctgtaaatcaacatacgaaaccacatgaagaaaattaatagttaaaaaaattaatgaattgttttcaaaaatacaatctgcatactgaatggtgagaccacctcaaaccctgatgttatttaactccccaaacctggctggctgacttttgtcctcaaagcaaaaactggagggtatcactgagaaaacagatcaacctaagaaaaaaggcctacaggtaccatctgtaaccaccaccccagtgaaaagaccagcaccccatttgcccatctttgggaagccagtcagtcagttcctccatacacacacacacacacacacacacacacacacacacacacacacaccagtttgcagatggcatttgtggttgtttgaaaaaatgtccatgaattctttggtgctcctacattcaaaaggaagagcctaattcccatccttttatgtgcaggccatacttagtgactctcttctgacaaatagaatgtcgcagaaatgatggtgtgtgacactcaaaactaggatataaaaggcattatagcctcctccttattctctccagatcacttgctctcagcaaagccagctgctagttgtaaagatgctcgagcagcctctggagaggcccacattttgaggaactgagtgagtcctcctgc

SEQ ID NO: 303 - DNA, 116065 bp, Homo sapiens
ggtcccagctctgtagttgtgtttctcacacctgcagcactcaagaggctcgattctgcaacagctgcattgctgtgaccagggtgacagagtgcaagttcatatagtagttggctaagagccagatgaaatttaggcagggacatgccctgagattgggtgataacctcacctcaagttctgtacctctccttcctcccatggtcagtgaggctagttttcaggaggcaaaaaagacagagggttcagttgagctgaggaaccgatttcagcaactgcctaggagatcattcgaggacctgaacccctgtcaggactctggcaagcccgggggtctgacccagcattctccctgtcgctcctcctggccctggttgcttttctgtcaccccaaaggccaacacccacagtcccttgaattctcacttctaaggtgagggcatttgctgggtttagtcactgtccagcatggaaccctgatggataccatagattcaaggatcagctacccaatttatggggccaagtaccaaatgaaaatgtgggttccttgttaaaaaattattaacactttcaagacagcaaaagcggagcattataccaaatgcaggcccttttgagtgcaggcccagggcaactgccttgcttgcacgcctgagcagctagctggtccaggctggttccggtgcagaggccagcaccatccatcatctgggccaggaaggccacaaggtatgaagtccctttaggagaccacccagctgccttttcaggcctgccactacccagtctttcctcgagagctcactgatggcgtatggcacagtgagagtgagaaactggtgaacaaatataactgtgggtaaagcggggccaaatcaagaaaggaagctttgaaaaacagtcttttcatggaattaacctaaatgcccaccaatggcagactgaataaagaaaatgtggtacatatacaccatggaatgctatgtagccattaaaaaggagatcaggtcctttgcaggaatgtggatggagctgaaggccattatccttagcaaactaacgaagaaacagaaagccaacactgcatgttttcataagtgggggctaaataatgagaaccaataggcacaaactggggaaaagcagacactgcggcctacttgagggaggagggtgaaggagggaggggatcaggagaaataactactgggtactaggcttagtacctgagtgatgaaatgatctgtataccaaactcctgtgacaacagtgtccctgtattaacaaatctgtacatgaataagagtttttgttttgttttttttttttttaaaaagaaaaacagtctttctagagcctaatggattattcctggatgatgcctaaattatccaaacgatttcatgcaaagatctgggaaacagcttaatgaaagagccccaggcctgactataagttggggacacaggtgggcaaaattcctggttccagacctctttttctttaaccaaaagttctgaactgccctcaacttttgggtgccctcactttgcccccgacaaagcatgagtggggagcccactaggtgagctgctcagtccaagcctggctggccagaatcccaggaaggctgtgctttcctcacataaccgctagctagcactttgggcagcccaggtatgcagaatcactttcaagcgaaagatcacacgtattgagaatcttcagcgttcagagctaacaatcagccagtgattcaaactttctaaaaggaattgagcgccccctgctgggtattgtagcattgacattaaactatcctctcaaatgcatcaaaatctgaaactacagagatttaatctcgtataaaatccagtgacaacaggactcatggtgacaacattatatatgagtttgataaaaggttgaatctttaaatgtttcatgactcccatgctcctattaaaaatgcttctagttctttatctcaattttagaaacaaggtacacactttaaagttctaagtattctggtaggattttcttcccatgtcacagaaagttttacaggaaaggtaacatggtcctgggagaggacatgggttttgggatcagacaacctaggctggaatccatttactatttgaatgacttggaataagtcttttttttttttttttgacggagtctcactctgtcgtccaggctggagtgcagtggcaccgtgtcagctcactacaacctctgtttcctgggttcacataattctcctgcctcagcctcccaaatagctgggattacaggcgcccaccaccatgcccggctagttttttgtttgtttgtttttgtttttaatatattcttagtagagacggggtttcatcatgttggcaaggctggtctcaaactcctgacctcaggtgatctgcccgcctcagccgcccaaaatgctgggattacaggcgtgagccaccgtgtccagcctggaataagtctttcaatgttaacttggaacaaatcatttaagtcaccatctcctgatcaataaggacaatgctatccacctaaaaggtgaatgtcagggctggaactcatgtgtttaaagtgcatagaagtgcttgattaaccatcgtgtcatcgttacgatactattacgatgtgagtctaagttgggtttcaaaggatgagcagcccctggactcagaccttgtttccagagactaggggctgtaactttagtcctgtgtctagctcagagatctaacccctgggtcatgagggcagtgctcacactgggcaagtctggacaattccacctcgaacaaatatttcaagtccttctacttttacctctatcttgccaatccaaactaccatcatttctcacttgagccaaagcaaagctcttctaatttttctttccacttctattcttatctccaaagtgatatatacatatatatatatatttaaatccaatctgatcaggccactctctctagttagaacctttcaatgacttagaaaaactttttttagccagacacctgcctacccaccttgcttataatgccagtcctacctcctggctttatgcagttagctctctctgtaagcaatcctcatctcccaattctttcccttattactactactcatcctttgggtgttgggtcacaagctcaaggagggtacaagagatagcacatttctttttttcaaagcaaattaagtccatttggcctcactctgctgcactgcaagcagaaattaattctgtggtccctggggtgtcctttccccttcttagggtcttgcaagcatttaggacactcatgaatgacctggaaaaatgggtaaagacctctactcttcagtctatctgggtcgttgctattatcttcactgccaagtctgagggggcccttgtaggagggggttccaagcttggaggtctttgccttttctggaagactcagtgttgaggtgcaggtttcctctggagcacccaacaaaccatgaaactctgaagttcaccatctcactgtggtactgagtggaacacagctttccactactcctaagaggttcctgtctgcagaccctcttctctcccaccctcccctgcttcccaaacaaggactagggttattattaagcatgtccgcttcctgatgtgcacgggaagcacacaggacctggttacttccttggagattggaaaaaaattcagagaaaaaattagtatttcaaattatgtgctataaaagctgctaatcacaaggtctcccttggattattcaatataaatcagatcccctccagtcacattctcctatactgcagcagtactgttggtacccattcccccagctactgtgtattggctgtcaaaggctcacagctgtgagaagagattttagttattcagtgtttccagagtttcaacaagggatacggacacaagcagccgaggctgcttcttacagagtgtcctctggagaggcgtgtcacctggcaatgcctgggaggttatgctgtcactgggggattgtgggaggggccaagccaatgactgaccaattcatactcagtacaaaggcctaaccccttgcctcaaggtgagaaaactcttggcatcgtcatgggccagaaatcccactggatcagactgaagctagacttcagctcaaaccacatcttggctcagcttctttccctgccctatcctgtttaccttacaggactcttctgaaagcacctcaataaatcacttgcacaagaaatctctgcctcaggcttggcttctgggaacccaacctaagtcacatcttttatttttccttcctagcatacgccccaaattgaaatcatgtatttgtatggctaatggtttaatgcctgtctccccaactaaaggctccatgaagggagaggccacacttactttgttcattgctatactcccagtgccaggcatggtgcctcccacagagaaaagcaatatgcaggctctaaactggaaagctgtcaggaaccaataggccacatagcctcttggcctccctctccagatactttcctttttgggtgttttggtacagacaattgaagaaagctaccctgtaacagcaacttagcatttcttgtgcccatcatcctcaagccagtcctagacggagatttcgaagccctggttgacaaaatctgactagcccaaattaggtcacctaattcctgatacaatgagctacagttctggcaccataacacaagttacgaacttgcccagaggctattcctgggggtggcggcagttctcggatgagtgtcatagacacaaaccaacagctgtcttacagatatcatattctggttcagcagaaatcaagaatagctttcatattttactggtctactaatattccagggaaaggctaggcaggattcacatgaacatttgtcaagttcttagatgttagtgtctcagagattacataccacaagtaagctgtaaaatcctcatttaacaagaatgtgaaagaactgtggcgttctaggtattttaattttttgaaaagctttttctcttgtataagtttttttaatattgtaagtctcttttctattaggttgtctttctttgcttactgaagggactggtgccttggggtctttattctgaagataaaagatttctaggcagaactactgatgcaaagagaagaaatcagcctggatgtatctggattataggatagctgctaaaatcatgtttgtgattgaaaacctaaaataagctaatttgttttttcatgtacctcttcctcctaaaagctaagtaaacaaaaagacccagcataaaaaggatgagaagagattttagttattcagtgttttcagagtttcaacaagggatacagatacaagcagcttcttacagagtttacaatctggggagagaacatgaaagacactgtttaacaggcaaataattccaggaataaatatacatgaatgtgtttttcaaaatacaggttcttatacaaatgtataactaaatactgattccatagtggggtggttgtaactgaaagggctttgagaaaaggctttgaataaaactagtcatccacctagccaaagatcctttccagcagcacaaaaggaatttgtaaggagaacagagattaactgtcagatatctttctaatctgtaaatttatccaaagtttgaaaataccatgaagaatcttaggaatgccagtaaccagggaatgggatatttgcatatcacaacatctacaggctaaatacactccgaatgcttctcaatgtggggaagtatgagaagttaataattctcctagtgtctggcttcctttttctttgcctttccctctcatacgttcaatcacctgtgttacaggacacacataagtagttggaaggtgttaaactttgacagcaaagcaaaatcagaggtagaggcaaatgtttaaccaatcatgttcaaatataagctactcaatgaagagttttaggtttaaagagcgaaatattcaccattactgagaaatctcagtttctcattcaatttcgcattgcactttgctaccacaaactaaatgggtgtacatttttgagtgctgatttattactcaaaggtttgaatttggagactgaaacaaaccatgctttatctgtgtactttgagaaaatccatccacaagaaaggagccaagcgtcagtttccaatggggggaacattctcatggaggtactgtaaggctaagtctgtccacttcatttcttgttctttgacagattctgtggtgccaccattgtcttgttcaggttcaggaagctcattctgaaaaggtacaatagaaattcagaacagtaatatattctgcatcttcttggaactcaagaacacttagaattaaagcttgtgagttcctaggaacaggcaacataattgatatgtgtattctaaaaaagctaaaatcatacacgtgaggaaactatcagaagtatcattcaaacatggcccgggccttcttcagtagggaatgatgggcattttgactctgacatttgtgaaggaggcactgtggcagaaaggttaagggcagaggcttttggaagccaactaggatccaagaccacaactctcccatttgctgggttacttgggcaaggtatgcaaacccttggggcctttgtttcttccttggcaaatgggagaacaaaagagccatcacctcacaggactactgtaaggattaggtgaggtaattcagatcaagtgctgagcactctgtggggtatccagtgctcaaggaatatttgctattattattagcggctaggaacactgagatgagtgaatcctaaatcttctttagcgggagcgtgctttaaaagaatactagtttgctggcatattccttagacacaagaaatgtatccaaaaaattatcttggacccaacatgtcttttttttttgagatggagttttgcttttgttgcccaggttagagagcaatggcgtgatctcggctcaccacaacctctgcctcccgggttcaagcgattctcccgcctcagcctcccgagtagctgggattacaggcatgcaccaccatgcccggctaattttgtatttttttatttttttttagtagagatggggtttctctatgttggtcaggctggtctcgaactcccaacctcaggtgatccacccgcctcagcctcccaaagtgctgggattacaggcgcgagccaccgcgcctggcccaacatgtctatattataataaaaatggaggtagggcaggaaacactgaaaatgtaattaatagataagacctccctctagtggtggagcagagcaacaaaaaacacaacaaatgaccaattcacaccctaccagcaattttcttaaaatggtaagtcatgggccacacttactgtaggatctgggatcatttacttgtattttaagtttaaatgtattactactgaaactctgctttgtaccagagttcacagataccaatatatttcttttcaattatctgtgttttgttttatggttagcaaactgttatgcgatatccagacttaaaattttccactggattctaatttgtagtatgtgaatatgttttcccctctaaaattatgctcaatatatattaaatgatatttacttatctatatttgaatcacatacatcttgttctacaagacagattcaaacatacttgaacagattgagaagagctatcatttattgtaacgcaataatatattatcttaaacttaaaaagaaagttcagtcctaataattacttatagatgacaaagaataaataggtccttggttaatgaattctttaattcagaagcagacaacgttgcttaatttcatcctatctgtggtatgctttctaaaataatgtgtctttcatttggtatctactgtcccttgcaatacatgccaacacataaaatggcatatatgcctggaaaacaaaaacaaaagtatcataaacccagccacccattatggtgtactgtaaaatgcccttagttctttgcagctactcttatcaaaaggtgaaactgatttccccaatcttggatttggactggccctgtgagttgttttggccaacagaatgaagctgtcatgccagtgggccagttcttggcctaagctccaagaagctctgccgtttcctctcaggttgctcttggaaccctgagattgagaagtctgggctagcctgctggataccagagaccatggcatagtcaccccatcacccagcagacagcttgttaactgccagacatgtgagacagtcctagattacccagcctccagagtctgttggctgactgcacaacacaggcaagcctggcagggatcagctgagctggtgcagactagaagtccctcccagctgagctacaaaatcatgaaataaacagttgctcttttaagtcactaagctttggggtgacttgttatgcagcaaaacctaactggcatacacattgccttagaatcgcaagacaagcgaaaggtgtggattagcagcagggccaagccaacttcgcctggaagtcagcagggaaacctccttccacccctgccacccaaatgttctccaatctgagccataaacttctccagaaatggacgtctcctttattttcttgactttgtttaggccctcctcccttgcctagaccacaacagcttgccaattggtctcacttgcccctatctccatgtcacaccatctctaacaatgctggctaaactgattttccaaaagccaaatctgagcatagcagtcttgcttttaagaccattcattcctggatctcctgaggatgaggtctaagtgtgatatcaaataccactctcaatctgatccaagcccaacttttcagcctacttatgtgacaaatgtattcttcatccacagtgaatgactcaccatgtcccaaagcctttcaaaactctgggcctttacacatctgtcccctctgctgcaatacccttgtctacctccactaaacttctggtccttccttatgacccagcttaaacatgacattctctcagaagcctttctgatgcccaccaggcaatcagccacttcgtatatgatgtggctgtttatgcccccacctagaatatttattatcacaattacttatctataagtgttgcctttctagacccctcaggaggaggaactgtatcttatgttcacatagtcttatggcacacagtaggcttcaaaaaatgcttgtcaaatgaatgaatgaacagaagttcacaagacaggatttggaacttcacagacctaggtatatgttatatgaagccctacttacctgctaccagactttgggcaagttgccctttctgatcctattcttttcctataaaatgggaataacagcacctccctcacagggttgtttaagaattagagataatgtatatttccaacctcagtccatggcataaaactggtattcaataaatgacatctataattcttattatgctctctcttttgactattttcctaagcttgaactaagctatgacttatttgatatgtatattattcattgaacatattactatctcttattcgtaaatgaaaatacagatgaactattttatttctttgcaaacagcaacagcagatattctaactataaattatattttattcaatactaactactcttctcagggcagctggcatgctttaaagaaaaacagtcctgttttcccttttttaggcctctatgacataaataggattttaaacaaacatttatataagcaaaacttttggatcacttattacatgaggtttaacaaactccctgcagcagagttttccaaagatggggaagaaaagagtattccagaaggccactggcctaaacgcaaaagaatacccaggtatcttctgaatattttccagggaacctaagataggtgtatgctccaagaatgtaagtttctaaaaatgctgaaagactgatgagccacaggcagggaagtaagaaacagagctcatatgctgctgcttcttgttcttccccatcttgcgcattaaactctcattatttggtttctctggttttcgtgtggtggacagaacatggctcagaaaatcggggctctagtcctggcatgactcctaactgacctggccatgttagctccctgaaccacatttttcttcaaataaaacatacaactggatgctctccagaagcttctagagttagagaattccacagctttgatttctttgccacactagtttatcttccattgatatccctcctccactagttactgccagatcaatacctttaacccatcctcagctcaaatcataacctaccagtggtattgcgacatcctcataaggcagcttgtcttctcgccaagcatcatcaatcaaatccaagatccttccatctctctgaacctcactgtccattttcctgcagctttgatcttgtcaaatctgtaagccaaagaggttatttcttaaacacgaagactgaagagatggtataatccactattaggattctccaggctttttagtctggggccaccttttgggaaaaggttcattttctcatatgggccgggtgactactttgatcacagttcctctctccaaccccaactgatacatattttatagtgtatactggacaggcatagcccagctgacagaccagtgtcatagagtgtgacaggagagcaacacgttaaacgaggccctcaaatattaatatgttgcatctcaatgtagctcttctcttctaacttgaacattcaccttttcctgtttgtgatgcctttgatgagtccctgattcataatggccagctaagtttcctttctagcccctggctcaaacctcagcattcttaggcacaggagtcacacgaacatactgtaaaggaaacggcttccttccctaaaatagtacccaggctgagatctgaataaagcacttctaggtgaacaccagtggtagaacctcatactgctaaagtttctccagtttctgcttccctttggggtagctccttcctcggaggttccttcctctaattcttaacgctacactcccttcaatttctggcccaaatggtcacgatgcttatttagctccttgaccatggctgattccccatttttctctgaaactgctataatctaatccaaaaggctggctagcttgtaggatacttctggatttccctgtttccaaggttgggccctgactcatcataggcatcatcctatgggtgctccctgctaccaagtgacaatccaaaaagcccggaagccactggcatcaaaggtactctcagtttctgagactatggagactcacacaataagcaattttggggtggtggagcggggtggaacccaccatctggaggtgcttttttcagagctcagcctgggtgatattttaaggaaggaagccatttcctttacaagctcaacttcagacatcgtcttgccttgaggatttgtgtcaggtctgtagttggtcccttcgcatagtccagtttagtgttatctcagtatgttcatgagctcctgtgcctaagaacgctgaggtttgggccaaggcaggtggaagtttttgtaaaaatggctcacagggccgggcgcggtggctcgcgcctgtaatccagcactttgggagaccgaggtgggcggatcacgaggtcaggagatcaacaccatcctggctaacagggtgaaacctcgtctctactaaaaatacaaaaaattagccgagcatggtggcaggcgcctgtagtcccagctactcgggaggctgaggcaggagaatggcgtgaacctgggaggcggagcttgcagtgagccgagatagcgccacgcgccactgcactccagcctgggcgacagagcaagattccgtctcggaaaaaaaaaaacaaaaaaaaccaaaaaggctcacagctgtcccccataggataactgcaagatatccctaacaccttggcaaaaattatacacagattggtgtgggaaagggtttacacccccatgacaaggatctcggcaaaagttaagcaaaatgcgccctgctacttctgtcaccggtgagccaggtgagggcttaattaatccagtactcaataattaaccgagtactacccagtggataactcaaagcaagacgaagttttggttatacttttgaagtccctgtcttacaagtgctccccactttcctgctgctactcctttgtccttgctgctctgtctcctgggatacccttctcactttcctcagctgatccaaacctgactttcggaggcccacgtagattttccacctttgtaaagttttctcaaatcactcgagcttcagtaggccttctatccttgaactcttgcttcttgtcctaacttaatctactaaacaagctaggtcagctttgtggtcaattgctcaggtattattgcctccaactgttacgtgtacattttgtacccatgattccttagtagatctttccacatttggtctcaatctttttcacctgtcccttctccaaacacctccaaccctgtcacattttccagccttgacagttaaaacccccttttccacatcactaatgccactcttcctttcaagataaacgcaggcgtcagctcttgaaggtcaacatcccatttccgggattaggcgcgaaggtgccttccctcataaggggctggaaggatgggaagcatcaagataatcaatgcccagggcacactgattatcttgtgtattaaagccaccgtcccaagtactcgtcacccagtacgaccactgtttcctgaacaaacttttcttactcacgtgacagtcccgatgcctgcaatgctctttgtttcttcctttttattccagtgaacccacagtcagtctaaaaatcttaggtcccaggtcgcttcctataggaggccgcctccaaaccccaggctgagtgcggtcccggtacccacccctccaggggtctcacagttccctaagcacagagcatggcaccaactggggagtctgtcaaacagcccagatgaatgtctttccaaacacgcggtgcctgcgtttccagggacagggacacgtcttatcaatttctatatattacagctttgtaaacataatatttataaaatcaaagcgggaaagccttgttccttgctagaaatgagcctcgcaggccaccaccatccgcaccgtacgacaggccgtccctcagctgcggcttcctgcctcaggcaggatgtaccaaacgtggaagcggagacggggaggtctgggggtgccacgcaagtccctttcctcccgacacgagtgcagtaaagaaaaacggttatgagcgtaaagtgacagcctcggccgatgggaatagggggaagtccgacactgagcaacgaacgcattcccgcgcctccaaaacctaggccgggggcgctggaaacccttaccggcacccggccaccgcggcagacgcttgctcctgccacgccccccccccctcccccgcatcacgtgtctgcactcgctttcctcggattcccggatgtgggtgagttcatttgctcgcgtgcaggggaagtctggagaaggcattgtttcaattattaaaagtgtgggggcagtgggcggaacaaacgcgccgactacagaggctggacgtaagcttagcggtggcgcgcgtgcgcagcgccggcccgaggtaacggcgggaaggctcaggggcgtgcttgcggcaaccctgtaaccgccggtgcgcaagttggaggggcaaggggctgccgtgtcctggtctggaggcggcccaggctgccttggtgattctggcttcgcggcctcatggcttgcggccggtttgcgcaacggcctgcgaaccaccaggcgcgtccccgccggcttgggtccgccccgaagcccagtccctcggcctggcccgctatgccctgcacactggcggagtctggcgtggcgcagcccggcgtggggttcggccccgccaggtggtcagcccttcctcggagtccaggtggctgggggcgcttcggagagtggccaggtgggcgagcgagctgcgcccagtactcaccttccccggcggacccaccttccttttcagcggagagaccccagtgcggcctccctgccagggctgctgtctagctagcgctgttgggactacttcattcacggcacaaggggacccgctcatttagtgtggcatgttaaggttggcagcttttaaaatagtgagttggtttaaacggttatgttagtacaagaggtacggaaatgtggcataaatcgtggactgaaattggagaaccctgaactaacggctccatgcacacaaatgagggatagaaagaaataaggacggtttcttaggaacactttaatcatggagatacttgaagacagtacatttaggcttataatgtggtttttcttacgtcccttacgacatcaggagagtaaagatgagtatgatgtcagagacaggtcgtcttttacagtttcagcaccgtacgctgatatgcacagagtagttttccctgagccttatgtctggttaaacttattaaaagaatttattattttaataaagcagtattgtagggtagatgccctgtatttatacagttcctcaagtgcttgcatttattttttagatacgaggaaatcataaggatcgttgattagatttctgttagctgtagcttaatgataaagtgtatatattttcttatttggcatgcagtaccatttttagattgatttttattttgagtttgctttttgactgtggcattatcagtgatcagggtagtaaaaagctctgaaactaaattagagtagagatttataaacaggcacactgccttttaaaatgtatgtagatgcaaatctaaaagttgtttgtaaaaattgtgtatgttgattgtactgatgccatttcctctcgttaaaatggtggaagacctttgcttagtcctttctgttctaatttatgttgtgctggcagatggtgacagcatcagtagtccactctgtcattgcttcctgctttcaaaaaatgtcaacttgacttgaaattcagctaaagccaacattgacagaaggtttcaggaactgaatctccgatctttatgttattttagtccgcctccccgcccccatcaggagctaggtttttcagttttacagagccacagtactgtcattacacatacacaaattaataaaaattctctaatgtcaatatccagtcagataacgatttcttcaactgtctcttaaatgtctttttacaattagcttgtttgaaccaaaatcccacagggatctgcctattgtgtttgggtgatgcacatttgacatcttttaatctatatttgttccctcatagttatagctatgggattagcccctatttttccttacagttctaaatttagcagattgcatcgcacagtatcctttaacatgtatctctgttgcctttgtgtcctctaaaccaggggcccccaaacccggggccgcagagcagtaccagtccgtggcctgttaggaaccaggctacagagcaggaggtgagtgacaggctagtgagcattacctaccacctgagctctgcctcctgtcagatcagccgtgaggttagattctcctaggggcacgaaccctattgtaaactgcgcatgcaaggaatctaggttgcacacttataagaatctgactaatgcctgatgatctgaggtggaatagtttcatcctgaaaccatgcccctaaccctgtccatgtgtattattcatattactgaagaagtggttggccgggcgcggtgactcacgcctgtaatcccagcactttgggaggccgaggtgggcatgaggtcaggagtttgagaccagtgtggccaacatagtgaaaccccgtctctactgaaaatgcaataaaattagccgagtgtggtggtgtgcgcctgtaatcccagctactcgggaggctgaggcaggagaatcacgtgaatccgggaggcggaggttgcagtgagccgagatcacaccattgctctccagaccaggcaagagtgcaagactcggtctcaaaaaacaaaaaaaagtggtttggccattcctcccccaaaacatttcatatgaattttaacaaaaagatatttacaaaatgtgttatttccgccctgtcggtgttgagaaattgtcttccatgaaacaggtccctggtgccaaaaaggttggggaccactgctctaaaccagtagttagatgtagaattgcactgtccggtattgtagccaccagccagcagtggctagttaattaaagtgaaataaaattaaaaattcagttcctaggctgggcgcggtggctcacgcctgtaatcccagcactttgggaggctgaggtgggtggatcacgaggtcaggagttcgagaccagcctgaccaacatggtgaaaccccgtctctactaaaaatgaaaaattagccgggcgtggtggcatgcgcctgtaatctcagctactaaggaagctgaggcaggagaaggagaatcgcttgaacccgggaggtggaggttgcagtgagccgagatcacgccactgcactccagcctgggtgacggagcgagactgtctcaaaaaaaaaaaaaaaaaaaaaattcagttcctaacttgcattagccacatttcaagtgctcggtagctacagattgcctggtggctgctttttgaacagtgcagttataaaatattttcataattgcagaaagttgtattgaacagcactgctctagaagcctgatgagatttcacccttatatttgtttttgttttgttttttggtgggatagttgggggggttggacagataatttcataggtaatgcagtatacttcctatttcattaattatcagggaagcagtgtctgagttgttttctttttttatgatgttaacattaaacattatattgggtttaggtgtagttagctccatccacccatagtgaaattccccaagactctttcacttagtggtgaagtccttttgtggggttatattgcctgtatccgttattgcattagaggttgcaacgtggtgattatctaattctattatttcttcaatatttatcaactgagagtcttttatgaagaactttccctttccagctgtttgactaccctgaaatacaatttgtacaggaaaggcaagaaaaatgcttaattctttgcctctattttcagaccacagtaatgagttggtggcctagcagcctccaaaggtaaccatgagggtttttgcctttttgtaaacctataatcatgaacttatagactttatatttaaactgtttcaacatatggcagttgtgtttttaatactcaaattgtttcatctttggccagtgggagctccttaaagttggctcctattccatttgatatgaccaatagctttggtaatttccttgctttctggtaaataattttcctggctcatttatagatttctggtcttcaaggagccgtggttcttttgagtctgagatagtatttggagaccacagtcttacctaggtgggagaggtgttcttgctactaggttagtcgttagttctaggatttatggtggccagagttaggaaatattatatattaaaaaaaacacaaatatgcaaaattcgcattgtttccaacatttaacatttaaatttccaaaatttaaacttaattttacagttttttcacacgttggatttatgtttgtatcttttttgctgagtcttggtgcctagtgccattaatagaattagttttttttcctcatcctatgttatatataatggtttcaagttaacaggctattttattatcaatatgattcctgaatagtgcttaggatttctttgcaactgtcttttatccttattttatatgtctctaggaaagtgtatagtaaaattattgtatttaaaggcatatgaagtaatttattgtatagttagcctatcaagttgatatctagttggtagttgatttattttattttgtttccaatttttcagtactgcttttttccccattttgatttgttttattatatgcaaaaccttagcataattcccataaaacaagtacccataaaacaatttagctttcatctctgtttcttccactctgcttattttccttccttactgatactgtttttactagttttgagtctatccttccattaaaaaaacacatacctaaaagcaaatctacatggacaaacatacctttctttcttaggtaaaatgtgctattatgtatactgttttccatcttgggtttttcacctagtgatatatgtcctgtagatcccctccttaggagtatgtagagattgttattcctttttacagtttcgtagtactccattggtggatgaatatttaattcgtcccctcttgatagacacttgtgttattttctgctattacaaatagtcatgcagtgaatatccctgtggatatgttgttttgcatttttgccaatgagcctgtgggatagattcttaaaagtagcgttgttggataaaagggtaaatgcatatatcagttgttaggtattaccaaagtctcctctatagcagttgtgttcattttgcattcctacctattatgtatatgagtgcctgttgtcccacagccttgtcatcagagtgtattatcaaacatttaatttttggttaatctggtacagaagaaagggtaacttactgtagttttaatttgtatttctcttatgagcaaggttgaacatcttttcatatttttactgtcatttgtatttttctgtgcattgcttgtttatacctctcgcccatgtttctatagattttttgcctaatcttttataagctccttatatatttgggtaattaaccgtttgtggtaaaactttcaggtactgttgtcatttgtcagttaactttgcttatggcactttttcatataaaagtttgtttttatgtactcctatttctcagactttctcattgttcttcctggattttgaactatagtttggacaattttttaaaaactttaatattttgaaaagtttctctaataccttatttactggtatcagtttaattaggagcctttctggaaaatgcttagtaatactgattgttcatcggaacagccatagtttactggccatggtatatctgacacaatcatagagctttgtaatgaaaacgacaccaaggcaggtacagggacagagagcattgttatcctcctttagacttgaaggttaggcatatcccttctcttagtatgtacacatttattcataattctgtctggagtttttattttcttcctgtgtcccattttgtgaataatttggtcttgggcatatactatgatatttttcctgatctgtaaaatgataaagttaaattagaggcctgaagtgctttctagctcataaagtctatgttaatgaatttcaaagatttgcctattataagacattctatttgtattctttttttttttttttttttttgagacggagttttgctctgtcgcccaggctggagtgcagtggcgcgatcttgactcactgcaagctccgcctcccgggttcacgccattctcctgcctcagcctcccgtgtagctgggactacaggcgcgcgccaccatgcccggctaatttttgtatttttagtagagacggggtttcaccgtgttagccaggatggtctaattttatgtaattatatggcacatgcaaagaagaaatcaaagtgacatagtgcatagagttgaatgatggtcaggttggttaggaaaagaatcagtgatataactatgagcaactcagatgacaaacatccacagaaaatcagcccttactatttgcctgatcctgagaattgatggtgtttggcaccaggcagatggtgaaggtattacagaaacactttgcacattagtaagtttactttatttctcacataggatattactggtccacttccctcctttttttttttttttttaaacaggaatctctatcttagaccattttgatttctaaaatagcaatatttcttatgtgactatttcattattgtgctgctgccacctggtggccacagtagtgatgtcatacttcagtttaatttctttttttattgcaaagacactattaagccaaaagataggctgatatattttaagatatagaatactgtaaaatatataaaggttgcacatcgattgtgactcaattgattgccacaatgtctaggttgaatccaggactataatttttagtttatcatagtcaagttatttaactctctaagcctgttttctcaaagtaatagtatctgtcttttatgagtatagtgaagattgatttagacaatgtgtacaaggcagctgttgaacattcagtaacttaacttctaagtatattattaaatagtcatagaaaatatattaatgtatattactaaatatattaatgtttaagaataacatgacctaaataagtataattttactaatgataattttgaataactgtgatagcactgtcaataagaatagcactttcctacatgttagttaagtatccgtgtatggttgtcaggagcatgctacttacagtggacatttaattggctgttagaacccatgaaaaagctggaagaaaccttagagaatattgttcatgcccctcattttgcagatgttaaaacaagtccgagaatataaagctagttagttgcagagtaggactgtatcctgggtctccatctagtgtggtgtggaccgtgtactgcctcccagttctcctagagtggaccaaaacatggaatcttggttgcattgtagttggactgtattgtgatttgaaagtggagtaaaacatgggaacctttttctttaggtttttatttttgcaattttggtgtaatatgtaggataaaccaactagaaaaaaaatcctccctgtcacgtttgtgcacaaataatttaatactcagtttgttagtatctttaaaaatagatgcaaataaggtgcagtggttctattttccagtcttctcattctcctctgtgtctctggaacaccctgggcatgtctctcactatatttatcacactgggaaagcctttttggctcatttttttctgtcccatactagactattaataccttgaaaggggccatatctttcatcactatatatctagttgttagtacaacattgaattacgtgttgagtaaaataatctacttcttacagcagtataatttttagatgaggattagcccaggggcagaacctctacaccacagtctggttattgtcttaagggtttaaggaaaaagcattttggaatgaaaagtggtttgacattgaacattttgaagatttattataaaaggcgagaagcatacacatattaatcaacactactgagtttaagggtcctctttcctttctcactgtcacctttcttcatggtgtatcttaccctttattttatatttatttatttatttatttatttatttatttatttatttgagatggaatctctgtctgccacccaggctgtagtgcaatggtgtgatctcggatcactgcaacctccgcctcccgacttcaagcgattttcctacctcagcctccccatggctggaactacaggtgcatgccaccatgcccagctaattttttttttttttggtagaggcggagttttaccatgttggccaggctggtctcaaactcctgacctcaggtgatccgcctccctcggcctcccaagttctaggattacaggcgtgagccaccgcacccaactgtatcttgctgtttatatggcagtcttctatctcccgttccctctttctctgctagacccttcatgtagttccccagctgtgaccagtttgcatgggggagagggtaggtaaaagagggaggggagttaagttcagccaaaataatctgccacgtgccatgttgaaatgctgcgttgagctctgcagctgcagagatgaataaaattgggtttctgccctggagggatgaatagtctagtaaggaaaaatagtatgtaaaaaactcacttccagtgtggtgcaactcctatgaaagaacgtattaagcactgggagcaaatgaagtgcagaggtgggagggccctgtggctgcctttcggtggagagaggatgttgcatgcaggaagctctatgagcctgtcttcaggagtgagtaggctttcccatgatagaccaaagagtttaatctcagtacacttcgcattttttatactatctctttaatttttaaaaagctatactttccctctgacatgtgtgaacccatttctttctcattttgttaagggagtttgtgtatccgtctgctagagagatcccacctccacccctgctcacccgacattaggaattaggcaaagaacaatgagatatttgatatttacacggagagagtgtcaaccgcaattcagatatttttaagttattctgttttagtccgaaatagtttgttcctagtattcctgaagtgatgttctttgactgcttctacagtcatcttaagaagtgctgcattttttcattattatgtatgctttcattcacattcttaagttgtaagttagaatgttagaactgaagaaatgaattgtctcatgactgatatttttttctttgtcagttgccaaaacaaaggggatttggtgatggaggctttgttagaaggaatacaaaatcgagggcatggtgggtaagtttgctttttttaaaattaatttttttggttaatacatgattacatatttatagggttcacatgatactttgatacatacatataatgtgtaatgatcaaataagggtatttagtatacctatcagctcaagcatttatcattttttgtgttgggaacatttcaattcttctagctactttgaaatatatagtaaatttttaaagtttaaggaaccttactgtgctagtcacccgactgtgctaattacttaactagttacatactagttacttagtagtcaccttactgtgctatttaacactagagcttactcttctacctaactgtatggtttgtacccattaaccaaacattcttcacccccaaccccttcccagcctctggtaaccatcgttctactctctacctccatgaggtgaacttttttagaccccacatatgaatgagaacatgagatatttgtctttctgtgcctattatttcacttaacgaccaccagttttatccatgttgctgcaaataacagggcttcattcttttttatggctgaatagtattccatgatggatatatttctgacattttctttatccattaatctgctgttggacactcaagtcaattccatatcttggttattgtgaataatgctgcaataaacatgggggtacaagtatccctttcacatactgatttcctttcctttggatagattacccaatagtgtgctttctgaatcatatgtgttgtgagtggtgcaaagtcagacataaccaggtccatacatgtttgtgtcttttctacaagagcaaacttttattgatgctatttcagtcataaaagccacaagctacatggagttcccaaggaggcatttccccctagtactaccagttcactcaatagtcagagccatgggcatacaggctcaagcctctccacaagtcagtcagtattgcaaaccatacataatagtgtattaatatatgtaaatgttgcagtgtaaacattccacatcaaacaaagtaacatttaacaggagaaaaggatagaaaaaaaagggggggggggctaaagaactagtccaaagagaacaactggacaaagagaatattctggcctgatctggacggttgtcaacattcttgcaaggaggagcctttggtgacagatgccaggtgctgatcacaagtgacagccagacaggctgttatcaagacagctgttttgagctggtaaagtcttgctctttttgtggccacagaatcttctggtgataactgatagtgaaatattgtgcctgtttatgtcattatctgattgagtgcagtctttattgataaggtgaacatcgggtccctgtgggcatgatgtcttttgaaatgtgagatgcaatctctttctaaaatggagttacttatgttaagggtgctatatacaatatggtagttctatttttagttttttagaaaactccatttagttttccataatggctgtactaattttacattctcaccaacagcatatgagagttcccttttgtccacatcccccccagcatttgttatattttgtctttttgataatcattctaactggggtgagatgaatcattgtggttttcacttgcattttcctggtgatttagtggtgtcgaccattttttcatacaccttttggccatttgtatgtcttctttagagaaatgtctattcaaatcctttgcccacattttaatagggttttttgtttttttgctgttgagttgtttttcttgtatattctggatgtttagtcccttgttgaatgaatagtttgcaaatattttctcccattctacaagttgtctttgactctattgtttcctttgccgtgcaaaaactttttagtttaactaggtcccaattgtcggtttttgttttggttgcctgtgcttttgaagtcttaaccataaaatctttgccttgaccagtgtactgaagcatttcctctatattttctttttgtttttttagagacgggtgtctcattctgttgtgcaggctggagtacagcagcacagtcgtagctcactgtagcctcaaactcctgggttcaagtgatccgcctgcttcagtgtcccaagtatctgggaccataggcatgtcatctggctaatttaagaaggttttttttttaagagatgagatctcattgtgttgctcaagcagttcttgaactcctggcctcaagtgatcctcctgcctcagcctcctgagtagttgggatcacaggcatcagccactgtacccaatccctatgttttcttctagtagttttatagttttgggtcttacatttaagtctttagtccattttgagttgattttttttttaatatggtgagagataggggtctagtttcatttttctgcatgtgaatatcaattttttccagcaccatttattgaatagggcgtccttttcccattgtatgttattggcacctttgttgaaaatcagtgggctgtaaatacaatttctgggttgtctattctgttccgttggtgtatgtttctgcttttatactaataccatgctattttggttattatagcttggtagtatattttgaagtcaggtagtgtgatacctccagttttgttccttttgatcaagattcctttggctattcagggccttttatggttcggtgtgaattttagtattattttttctatttctgtgaagcatgtcataggtattttgatagagattgcattgaatctgtggatagatttggatataatcatttgaatatattaattcttctgacccatgggcatgaatgtcttttcatttgtatcttcaatttccttcattagtgtttcatagttttctttgtagaggtcttttatgtccttggttaaatttaatcctaggtattttttttttctggtagctattgtaaatgggattgcttttttgatttctctttcagctagttcattattggtgtatagaaacattactgatttttgtatgttgattttgtattctgcaactttactgaatttctttatcagttctaagacttttttggtggagtctttaggtttttctgtatgtcagattatgttgtacacaaagagcaacaatttgacttcctcctttccaatttggatgcctctatttctttttcttgcctgattgctctgactaggactttcagttatgtgttgaatgggagtggtggaagtgggcatccttgttgtgttcaggttcttagaggaagggctttcagcttttccccatccagtataatgatacctggggagctgtcttatatggcctttattatgttgaggtatgttccttctatgcttgagagtttttatcatggagagatgttgaattttatcaagtgctttttctgtatctgttgagatgatcatatggtttttgtctttcattctgttgatgtgatgtatcacttttattgatttgtatatgttgcatacctgggataaatcccacttgatcatgctgtattatctttctgttctgttgttggatttggttggctagtattttgttgaagatttttgcatctgtgttcatcagggatattggcatgtagttgtcttcttttgttgtgtccttgtctgcttttgtcatcagagtaaaggtggccttgtagaatgagttaggaaaatttttctcgccttcaatttttttggaatactttgagaagaattgatgttcttctttatgaagttggtagaattcagcagtaatgccatcaggtcctgggcttttctctcttgggagactttttattcctggttcagtcatgttactcattattggtcttttcaggttttctaattcttccgagttcaatcttggtaggaatttatttcctctaggtgttcctatttgttagcatatagttgtttgtaataatctctaatgaccctttgtatttctgtggttatcagttgtaatattgccttttctgtttctgattttatttatttgggtcttctcttttttcttggttagtctagctaatggtttatcgattttgtctttttaaaaaaccaactttttgtttcattgattctttgtattgttttttagtctctattttgtttatttctgatctgatctttgttatttttttccttctgctaattgggttttgtttgttcttgctttgctactcgaagtgcatcgttaggttgtttatttgaagtctttgtactgtttttattttttagattcaggggtacatgtgctggtttgttaaatgggtgtattgtgtgatgctgaagcttgggcttgtatgtatcctatcatccaaagaatgaacatagtacacaatagatagtttttcagcctttgcccaccctctgcccttgccttcttttggagtctccagtgtctgttgttcccatcttcatctttttttttttttttttttttgagatggagtctcgctctgttgcccaggctggagtgcagtagcatgatcttggctcactgcaacctctgtcttctgggttcaagtgagtctcctgtctcagccttgcaagtagctgggattacaggcacacaccaccatgcccagctaatttttttgtatttttggtagagatgggatttcgccatgttggccaggctggtctcgaactcctgatctcaagtgatccccccgcctcagcctcccaaagtgctgggattacaggtgtgagccaccatgcctggcttattattcccatcttgatgtctgtgtgtactcaatgtttagcttccacttgcaaatgaaaacatgcagtatttggttctctgcttctgtgttaatttgcttaggataatagcctgcagctgcatccacattgctgcaaagaacattttgtttttcttttatggctgtgtagtattccatggtgtatatgtactacattttctttatccagtccaccatcaatgggtacataggttggtttcatgtctgctattgtgattggtgttgcgatgaacatgtgagcgcatgtgtctttttggtagaattatttattttccttcgagtatatacctggtaatggaattgctgaatcgattggtagtctcattctatttttagttatttgagaaatctccaaactgctttccacaggggttgaactaatttacattcccaccaacggtgttgccttttctccaccgcctcaccaacatctgttattttttgactttttaataatagccattctgactggtatgaggtggtatctcattttggttttgatttgcatttctctgatgattagtgatgttgaacatttttcaagttccttgtagtttatggatattagccctttgttggatgcatggtttgcaaatacgttctctcattctgtaagttgtcagttcgctctgtcggtagtttttttttctgtgcagaagctctttagttaggtcccaattgtcaatttttgtttttattgcatttgcttttgaggacatatctttttgagtcataaattctctgcctaggccagtgtccagaagagtatttcctagatttttctcctaggattcttatagtttgagatcttacatttaaatctaatccatcttgaattaatttttgcatatggtgaggaagtgtaggggttgagtttcattcttcatacaagtagccagttttcccagcaccatttattgaacagagtatcctttctccattgtttgtttttgtcagctttgttgaagatcagttcattgtaagcgtgtagctttatttctggttctctgttttgttccattggtctatgtgtccatttttgtaccagtatcatgctgttttggttactatagcattgtagtgtaaagcaaggcaatatgatgcctctagctttgttcttcttgcatagggttgctttggctatttgggctcttttttggttccatatgaattttaaaatagtttttttctaattctgtgaagaatgacagtaatttgataggaattgtattgaatctataggttgctttgggcaggacggccgttttaactgtataaattcttctaatccatgagcatggaatgtttttctatttgtttatgtcatctgtgatttctttcagcagtgttttgtaattctttttgtagaggtttttcacctctgtagttagatgtattcttagatttttttttatgtgtggctattgtaaatgggattgtgttcttgattcagtactcagcttggacgttattgctgtatagaaatgctgctgatttttgtacattgattttgtattctgaaactttactgaagcttgtttatcaggtctaggaacattttggtaaatctttagggttttctaggtaaagaatcatatcatcagcaaagatagataatttgactttttcttttcctatttgaataccttttatttctttctcttgcctggttgctctggctaggacatcaagtactaggttgagtaggagtggcaagagaggacatccttgtcatgtcccaggtgtcaaggggaatgcttttaacttttgcctattcagtatgatattggctgtgggtttgtcatagatggctcttactattttgaggtcggttccttcgatgcctagtttgttgagggcttttaacgtgaagggatattaagttttattgaatgctttttctgcgtctattgaggtgatcatatggtttttgtttttaattctgtttatgtgatgaatcacatttattgatttttgcctatgttgaaccatccttgcatcccaggaataaagcccacttgattgtgatggattatctttttgatgtgctgctggattcagtttgtattttgttgaggatttttgcatctatgttcattagggatattggtctgtagtttttttttgtttcatctttgccagattttggtatcagggtgatgttggtttcatagaatgagttagagatggatccctgctcctcaatgttttggaatagtttcagtagtggtactacctcttatttatatgtctggtagaatttggctgtgaatccatctggtctggggcttctttagttggtaggctttttattactgatttaattttataactcgttattaatctatcgaggatttctctttctccctgtttcaattctgggaggttgtgtgtttccaggaatttttccatttcctctagattttctagcctgtgtgcatacagatgttcatagtagtctgtgaggatcttttgtacttctatgggattggttgtaatgtcacctttgtcatttctgattgtacttatttggatcttccttttttttggtgatttagctagcagtctatcaatcttgttatcaactgtttatttcatttgttttggtctcaattttgtttatttctgctctgattttagttacttctttttttctgctggctttgggtttagttcttatttttctagttcctttaggtgtgacattacattgttttaggttgttaacttgagatcttaatgtaggtgtttagagctgtaaactttcctcttaacatggcaaagaattttttcatatctgcctttgtttacccaaaagccattcaagagcaagttgtttagtttccatgtatttttgtggttttgagaattcctcctggtattcttatttttattgcactgtggtctgagaagatacttggtgtgatttcaatcttttttttttttttttttttgtctttgtgctgttttgatgtaggcatctattgctataaacactcctcttagcactgcctttgctgtatcccataggttttggtatgttgtattttcattttcatttgtttcaagacatttttgcatttcttttttaatttcttcactgacccagtggtcattcaggagcatgctgcttaatttccatgtatttgtgcagtttccaaagtttctcttaatcttgatttttagcttttgtccattgtggtctaagatacttgatatgattttgattttaaaaaatttgttgaaacttgttttgtggcctaacatatggtctatcctggagaatgttctgtgtgctaaagaatgtgtattctgcagctgttacatgaaatgttctataaatgtctttaggtctctttggtctgtagtgtagaacaaactggatgtttctttgttgattttctgtctaaatcacttgtccagtgctcaaagtggggtaccgaagtccccaattattattgtattggagtctgtctctctttagctctaataatatttgcttcatatgtctgtgtgctctggtgttggatgtatgtatatttacagctgtaatatcttgttgctgaattgatcccttttcattatataatgaccttctttgtcagtttttatgtttatatgacttaaagtctattttgtgtgatataggaataactactcctgcatgtttttggtttcccatctcttcattttcagtttatgcgtgtctttacagatgaagtgagcttcttttaggtagcacatagttaggtcttgctttttatagagatattcagccattctatatcttttaattggggaatttaaaccatttacattcagggttgttatagataggtgaggacttaactcttgtcgttttgttaattgctttctggtggtcttgtatatcctttgttcctttcttcttcctttattgtttacctgtgtaatttggtctctctctcttttttttttttagtgataatgtttgatgcctttctctttctcatttgtgtttctcctccacgagtgagtcttatactttttgtgtgttttcacgatagtagatatcatccttttgcctcatgatgtaggaatcccatatgcattttttgtagggctggtctagtgatgatgaattatctcagtttttgcttgtctgggaaaaactttatttctccttcatttttgaaggatggctctgttgggtatagtattcttagacaccagttttatttgttttcttttaacactttgaatatatcgccccattctctcctggtctgtaaggtttctgctgagaaatctgctgttagtctgatggcaatatccttatatgtgaggaactcacagaacatctgacatttttctcttgctgtttcagagttctttgtctttgacttttgacagtttgactataatgtgccttagagaagacctttttaggttgaatctatttggggatatttgagcttcctttatttggatatctatatcttttgcaagaattgggaagttttcagctattattttgttaaattggttttctgtacctatgccatcttttctcttgctggaatagcaagaatttggatatttgatcactttatggtctcccatatgccatgtaggctttcttttttcttttttattctttattcttttgttgtttttgttgttgtctcatggggttatttcaaaaggtccatcttcaagttcagaaattctcgtacttgtttttactctgttgttgaaactcaattgcatttttaaatttcatttattgaattcttcagtttcaggatttctgtttggctctttttaatgatatccatctctgttgaatttctctttcagaacataaattgttttcccgatttatttttattatctgtgttttcttctatctcactgagtttatttaataacattattttgaattcttttataggcatttcatacatttccttttctttgggatctgttaccagagaattattgtgttcctttgaggtgtcctttttctttcctttttcatttttcttgtgtccttgtgttgatttctgtgtatctggtataatagtcacttcttccaattatatggattggctttcatagggaaaatttttttcatataggtgtatctatagtgttggttgggtagggtgcttttgatttgattctcagtgggtgcaagagtgtagtttctatgatttttccagccataatcagtatcagtggtttctgtgagtttttcagtgacttggactgtgattgtcagtggaggctatagcaaggctctgctggggtagggacaccaggcagactggtcatcacgtaccagacagtgatgccagtggcaggcaggatgggcttgtcctcaggctcccagatggcatgcacaggcactgatagtagcaggcagggcagatcaatccccaggcccgtgggtgacatgcacaggcaccagtggtggcagtagtgggtgaggcaggcctctccaaggtccctggatgatgtccataggtgctggcagtgatcacggtaggttgattctaagtcacctagtggtggcaggaggggctaggctgatcaccagtgcctcagacaatgtgcctggtagtagtgatgggcacagcaggcctgtcctcaggtccctaagtggtgtgtgtggactcccagtggtaagttttcttttaaccttaagcttctcactgcagtttaaaaaacttatctgagttgtgcctctgaccatattgtgctttgggtacagaagcaaaagtgttgagcaaaagctaagttgatccatgtcatggtcacagcattttggggggactttttttgggttgtttgcctcatcacagcagtgtgaagctagttgtttgcctacatcctatcttgagttttctactcttaagaagcaaaagtacaaaggttctgtcacactaagaacaggtgctttttgaaagtatttaagccttactgagagctgtcttgtggccatttctggaaacctctttgaatctaatatatctgtgtccacttctgtttctcagcaatatctggcatctcctgaaatgccaggacatcagtaggtttacaatagtaaggtagactacagtaagtttctgacagaaaggtgggcagaaatagttgaaataaatctggctgaaggatgaatttcttgaagcagctcttacaattgtattatcactttcctgcatgatagtctgctttcttccaaggctttttcctttagctagatgaaaatgtgatgtataggcttgtctggatccttcctgaaagcttccttaatatgttacagaggcgcttgttggctgtagcagcctggctccacaaaccagacttaaaacatcaatcttgtgcttaaccaaacaacttgggctttaggttggctatgagaggaagataagatattctgtggaataagtaatcatcttaatatgagcattaaaagtaaaagctcaggccgggcacggtggctcacacctgtaatcccagcactttgggaggctgaggctggccagatcacctgaggtcaggagttcaaaaccagcctggcctacatggcaaaaccccatctctactaaaaataaaaattagccgggcatggtggcgcatgcctgtaatcccagctactcgggaggctgaggcaggagaattgcttgaacccgagacgtggaggttgcagtgagccatgatcatgccactgcactccagcctgggcaacaagaatgaaactccatctcaaaaaaaaaaaaaaaaaaaaaaaaagctcagcaatcctattctttgcttctggtaatttattaatttacattaatgtcatttaattatttacttcaggtagatttacatctgctatatttttacatgaaaaagatgaaaagccacttgaacatatcttctgtttttttaatgatctgttcttctttataggggatttttgacatcttgtgaagcagaactacaggagctcatgaaacagattgacataatggtggctcataaaaaatctgaatgggaaggacgtacacatgctctagaaacttgcttgaaaatccgtgaacaggaacttaagagtcttaggagtcagttggatgtgacacataaggaggtaaagcaatttatttgttcttctttttgacatttttatcttgtcttttatattaaatgtgtttcttaagtatttgttgaagaaagaatttgtataccaagttagtttattgttttttattataattctgctgttttattttagaagaaaaattcattgtgaaaatgtataagaatgttatcatttatttcaaggatcattttaccttggttacatataatatatacataacttctttaagaaaatgtaaaagggtaccacacattgtttgtttaaccttcatcatattacatgtttatattaacattcactgagtttcatggaaattgcttttggcttcactgtatggctggtattacaaaagaagttccagattaaagaatttgcctcttttggttagatttaaaacaaagttaagagaatctttaaaaaaaaacaaaacaaaacacgtttaccatgttgaaaattagaggagaagaaagaaaagaagaaaataaaaattacttgcagtcccaccactcattgatattggtaatttgggggaaaagtttaataatatttgctggttgccttctcataaatttagctggtaaattaggaggaagtacacagaatattggaagggaagtagaaagcatttatgtgtgagagttgcctgttaatttttggtatggatgtcaatctcagaaggattggaagagttagagttataggggagcactggtcccatttctcactctgaagaccttttctaccagtagggtcaccattcattaaggctgtcatcagcttattcaggtacacttctgtgagtggtacacactgagattgtgattttgttgagaaaacttattaagaatagtttagaaatgtttctcgtaacaaagagtttgacttgttaaaaatgttattatgcttacccagaaaatttctccttggttggccatttgcaacttgggtcaaagtagtgcgtggcaacactggctgtatcaaagttttctgctaatgctgtttgctaaattgcaattaatttaaaatttgactaaaactttgagaatatattttaaaattacacaccatgcgaaaatacagaaggtgatgcaaaagtacagtgaatggtgatcttgtttgattttttaaaaatcataatttaggcagggtcaatgttccttttatggtaggctacttagctagcactttgtttctcctagggcaaaacaaaattctgtttagcaagttgaaatgaaagtggttttctggttgataaatagattgtttattttgttagaaactcattaaagaattatgtgtgattatgataatatttagtcactgtaatgctaaatttgaacttattcctgtggcttagttttgacgccacgggcattgttgccgttacttaatgcccttgacatcaaaatttctctcaaagagaaattaagagagatttaagggattaaatggatagattccatggtaaggatatgaagatgttaagtttggcctggggacatacaagaaatttagaattgcagctctctggttaatttgctacttcattgattgggctgctgaaagttgattaagtttctagaagtaggtttctgaagataatctagtaatgggaatctattccatagaatttgtgtgtgagattgtgttgtattacaacacttctttcttgctttttttttttttaaggaacaaatgtgtttattattgtgctgaaaaattatgaccaccaacaaccaatgaagggcaggaaggaacaacactatgagatcatgaaaatattttgcttcttgtattagtctgttctcacattgtgataaagaaatctgaggctgggtaatttataaaggaaagaggtttaattggctcacagttctgtagaaacatagttgcttctggggaggccccaggaaactttcagttatggcggaaggcaaagggaaagcaggcctatcttcacgtggtggagcaggagagagagagtgaagtgggaggtgctacacacttctaaacaaccagatctcaggaaaactcactacaacgagaacagcaccagtggggacatctgcccccatgatccagtcacttcccactaggccccacttctaacattggggattatagttccacatgagatttgagcagggacacagacccaaaccatatcacttgtcaacaaactttcttctcttgctttaacatttttgacgattctttcccaaacctattaagtaatgatgatggttacaaattttccagttctaccactctttccagtgcattattttttatatcttcattaaaggagcaaagcaaatcccctacttgtaataataagacaatattggagactgccattaaaacacaggagaagtaaaaaaacagatctgttccaagacacacaggactataaatttaggaaatacacagaaaattaaaagttaaactcaattggatacattaaatatgtgcagctttttgtatgtcaatcatacctaaataatgtcattttgaaaacaaatggtccaacctgtaccaccaacaggttttgagtatatataaatctaatatgtatttatgagtagggagcaaccttaaacattttaaacagcagaaatacacaaagcaattataggtggaagtaatacaaagtgccttgtgtttctatcctagaatcaaactatagaagtctcaggttattaagaaaacaaatattgttttgaatattaaaaatcatgtgttttggagagggagagaattaacagcctttctctgccttagaatactttacattttgtgaaatttacaatcagaatggagcatctcctaaagttgtcagtatgctagggagggaaattgagcacaggagcaaaccactgttttcttagtgctcagctgaagaaattttcacttaaaagagctgtagctgttgaagtcatttccattttagaagcgtactataaatgactttttctatgtattaactagaattaatggtaatttgtgaaatgttttatcatttttaaaattagagtctatatctcagccagtgaagcagcaggcactgctgcatgtcatagtctaacacctgcaatccaccagtctgcatggactgtaagcaggtatggagagaaccggagttcacctatcagcaacaccaccatggaatcgactgttgagcctttctactattaattaccatatatgtgccttttttctggtattttattcccactggatgctttttattaagaccttgtacctgtgaacacatttggggcacaacttactgtcttcaaggtgcaggggtgggaaattgggaggcgggaagcaagaagagtgcactcactctcccttcttgcatttctggagcccaggcttgtctagcatgaaactggaggtgaacccaaccatctgtatctgcagggagacttctcccatggtcttctcttgtggagattcctctgcctctggtgtcccaccctggctgcagttctggccctggaggccagcaaagcacctggggtagaagttttcttacagctgtattaactccttcaaggagagcagcagactcttccaaggcaggcagcacccccccaagagggaagagccatctcaggaggatgtctcctcagaacttttcagggacgtttaccccttgtccacctttgattttttttttttgtaatgatttctgaattctggcctcttttgctgtgctacgaatgtccttttattttgggtaggtgaaggcacacgggtgcttatgtgcatctaatttctggcctttggtgctcagctttaattgttggcaccaggcacacagaatgtcctggcgaatcaggttaatgggtagcagtttagagggtaatggagggattgatatcttcttctgaggttttaggttgttgtcactgaactctgccttcctctttgggcagagcactttgtcaccttttcatttggtcccctttgctgatgttcctggcaaagcaattgtgcttggttaattagaagtttactaatcctcttcccttgacttctctgtggatttccactctttgcctttttgacttctccatactcggaaaagaagtggaggttgacgaaatttttccagaatcaaaatacttctttcaagtatgtgttataacacattcataatccaatttgagcagtatatgaaataagaactagaaaatagggctttatgtttttgtcattgtattagttcattctctcattgcaataaggaactacctgagacagggtaagctatgcagaaaagaggtttaattgactcacagttccacaggctgtacaggaagcatggctggtgaggcctcaggaaacttaatcatggcagaaagtgaagaggaagcaggcacattttcacatggcggaggaggagacggagcaaagggggaagtgctacatacctttaaagaaccagatctcatgagaattcactatcacaagaacagcaagggggaagtctgcccccatgagccagtcacctcccaccaggccccttctccaacattgaagactacagttcaacatgagatttgggtagggacacagccaaaccacatcagtcattcttacttgtttgaaaggtacagacctagaagcacttagtcctagggtgtaaaccactgctaatcaaatgacaggtccatgatgagattaaaagcttgcaccagaatgtaaatcattgtagagagcaaaacccctcatctttcatagtaccaagtcattaaacagctaaaactgttaacagctaaaatcagtgtatatccatcttttgctgagaaaattttggttgtaagaatgtctgttacactgaacggtgtgtttcaagacatacttgatttacactctgcctcaggcttcttgtgctggattgctgtctgtgaataacttcagcccacctgcaaatcatacttggtggatcactaatataagcaacttgttttgtaagttaaggctttatgtgtttctggttacagtgttggcactgggttggttttaatggacattcctgctgttactatcttctagctccctacagggcacgttgactttgtgaaatgagtaagaaatttagagtcctggccctgcctcttttcagctgaatggccttggacaagtaacttccatcattattagcatttaatgttcctaaacttttcttcacctttatatttatacttgtcacagtaaataaaaagaaaaatgattctacaaggctcataagaaaaaatagtaatcttccccacccctctgaacctaggattcttacttctgtgaggagtaatttcaagcctttaactctttcttttggcattttccctatgtttccaaggaagcttttttactgctgtattttcatttatagttttagctgtttaatgacttggtactatgaaagatgtggggttttgctctcttacatacaattatcatcccctcatccttccaggagtgtatatcttaattttttgttagattaatattcagtatttacatcattaaatggtaaatattattcacagttgagtcaggtagtgtaattataagcagacttgttttttgtactgcttttttgttttcctggaaattactaattgtctcactttcatttggttttttaaacatacctaccattgattctttctgaaatctctgacacaggtgtaaatcttctgccattgtgtttaaacaaggcaattaatctgtccattttcttttctttcatttcttttccctgtgaagacatctctcctggagcttgccattctccaccgtggataggttgctttcaaggataggtgtatagctgtcatcatgagaactcccttcatcattattctggaggttttctgtgctcctctatttgtgcttctttgcattctctgtcaccatatttatatgtttacatttctattttgatagagcatagttttgagatcttgtatatctgaaaataatctttattctattttcaggcctgattgaaagtttgactggctgtagaaatcagctttagaagtaaatttccctcaggacgtttacagttaaatatgaattatttcagactttaatatttgataatggcagattaggtaatttgggccagtccactcaccgaggacaaataggtaagttagatttaaaaaaaattttgcttgaagtaaaatgctatcaggatggtgaacaattaccaggctgggatctgggctgggcaagcggttcagggaggtgtgtccagggtttggggccattattaactgaaaataaagaaggcagccgagaggataaaaggttgagtggtgtttttgataactttaaggggctaggggtccatgatggctctgaacgcctcctcagtttggctaaagaccctgaaaggctgcaccctaggagtaaggatggaccagaacaggccctcttgaaaaaaccactcagcttcaaacatctaaatccctgaaatcagttttaagttaaacttaagagtgctactgtccccaggcatctccaaagtgctagggcttccaggaacctggaagtagcaaatataaattttcttcaaaggaaaaattaccattctgggtttcagattattcaaataattttgcaaataatgcttggtacttgctcagaaaataacctgagacaacaaagaccaggagacaagacaacacaaaggaaaaatagtagaagcagcagaagatagaaatagacccatgataaatctagatatttgtcattatcatgcacacagtttacaataacaatgtttattgcattcaaggcactaaaagataagattgagcatttcgaaaaagaattaaaaactgtaaaaaaaatgagtggaaattttagaattgaaaaatagaatgactgaaattaaggtcttaaagattaagggataattagtgaactagatgatgtgacagaataaaatgtctagaataaagcacaggcaaagtgatagaaaatatagatgaaaggatatgagaaagagaagacaacaagaaagtctaatataagtgtttttggaatccctgaaggagaaaaaaaatgagaatgggcacaaaagatatttggagagatactggctgagattttgccaaaagtgaggaaggtcaagtatttaagaagtccaagaatctcaagcaagataagtaaaaagaaacagttgccatggttgaaaactaaagacaaagggaggaatctgaaaagcaatcaaagaaaaaaaagattatctacaaatagctcttaacagttgacttgtcagccaaaaaagtgaaagccagaaaacaataaaatgtctacaaagaaagaacatgactttttcctctaccaaacgagaattctgtatccagaataaaggtaaaataaagacattttcagatgaacaaaaattgagagaactggttacaagcagacctgcactaaggaaatattaaaaaatgttctttaggtagaaagacagtgatcccagattgaccctcagagctgcaggaagaaatgaaaagcagtagtaaatgtatgggtaaatctaaatgaatattgattgtataaaacaacaataatagatggagttttgctatgttgcccaggctggactcgaactcctgggcttaagcaatcctacctcagcctcccaagtacctgggactacaggtgcatgtcactgtgcccagctaacggtaattgccttttgagtttaacgtatatgtaaaattatggtggcaatggtgttatatttaagtcaggttgggataaatggaattgaagtatttatagctaacattagaccttgttaagtcacaaatccatgtttttatcttgagggaaccattaaaagtatatattagtagagaatatcttccatgctaatagagaaaaatggaatgataaaaaaagtaatcagtcccaaagaaggcaaaaaagaagagaaaaaggaacagagcttattaagtacaaatattatgtaacaagatgaaagctttaaatcaaaataggtttgttaaatgtaaatgcagtaactggcttaattaaaagaaaaactgtccaactggatcagataaacaaatgcaattattatttaatgtttatagaaatataaaaacattgaaattaaaaggtaaaatatataacatgcaaacagtttgactagaaagatggtataactatattcttaccagaaaaagtatgattggagcagaagccgaaagcattactcaaggtgaagaaaaacacttcataatgagaaaatgtgaaatttcaggatatgtaactttagtagacattctttgtgccctgtagtatgtcctctttgcctcctgatttccttttagctattaaatataggtccttatgcgctgccaacatctactataacaggagtttccaatcttttggcttccctgggccagattggaagaagaattgttttgggccacacataaaatacactaacactaatgctggctgataagcttaaaaaaaaaatcttgtaatgttttaaggaagttcacacatttgtgtagggctaccttcaaagctgtattgggccacatatggcctgtggcttacaggttggacaagcttgtagtatactttgtttgaaggggtgggttgcccctccacacctgtgggtgtttctcgttaggtggaatgagagacttggaaaagaaagagacacaaagtgtagagaaagaaaaaagggggcccaggggaccggcgttcagcatatggaggatcccgctggcctctgagttcccttagtatttattgatcattcttgggtgtttctcggagagggggatgtggcagggtcataggataatagtggagagaaggtcagcagacaaacatgtgaacaaaggtctctgcatcatgaacaaggtaaataattaagtgctgtgctttagatatgcatacacataaacatctcagtgccttaaagagcagtgttgctgcctgcatgtcccacctccagccctgaggtggttttcccctatctcagttgatggaacatacaatcgggttttataccgagacattccattgtccagggatgggcaggagacagatgccttcctcttgtctcaactgcaaagaggtgttccttcctcttttactaatcctcctcagcacagaccctttacgggtgtcgggctgggggacggtcaggtcttacccttcccatgaggccgaatttcagactatcacatggggagaaaccttggacaatacctggctttcctaggcagaggtccctgcggcatttgtgtccctgggtacttgagattagggagtggtgatgactcttaaggagcatgctaccttcaagcatttgtttaacaaaacacatcttgcacagcccttaatccatttaaccctgagttgacacagcacatgtttcagggagcacagggttgggggtaaggttacagattaacagcatctcaaggcagaagaatttttcttagtacagaacaaaatggagtctcttatttctacttctttctgcacagacacagtaacaatctgatctctctttcctttccccatactttgtttctctctctggggccttggaaagctgcttagatgaaatctggaagtgttgaggagttaatactcttagatcttaggtcaaggttcaagtagtggagggactaggtgaattctccaacttcccattcctcagagagacgattctgaaagattccatctggttccttagtggattcccagtggaattcatcaccagctgcttacttcagtaatatgcttaatatgctcaatagcacgtcctttattagctttccttccttctctgccttgctctctgtgtcctcactgtgctttctggggtcacctccagttgccctgaagtccatgtctcagcccacactttgctgggggactcaaaccaagatgaaaatgtctgcgtatctaatgtgtctagttaaatagttttaaaagaaaatcctctttctgtcttatctgtatgtgaaaagtgacagaactaggaaaaaacagatgaagccacaatcataggggagaattttaacacatttttcttagtaactgatggaataagagacaaacataagaatatagattttaacagcatgatcagcgaacttgacttaatttttatatatagaatattatacaacagaatttcagagtacacattcttattagcacaaaaaatacccttaccaaaattgaccatatgctgggccataaagtaaatcttgatacagttcaaaagcttgacgtcacaggtgtggtctctgaacatagtggaaataagttagaaaaagataacttgaaaatctgcatacatttggaaattaggacatgaagttctgaataattcatggatcagtgaggaaatcacaatggaaattagaaaatactttgaattcaaaatgaaaatacaacatcagacatacagaatgcagataaaatatctcagagggacatttatagccataagagcatatattagaaaagaggaagggctgaaaatcattgaggtattgattcatctcaagaggttgggaaaagaacttgctaaatttgaagaatgtaaaaagaaggacattttttaaaaatgaaagtaaaagcctggaagtgatatgacatgagaaaacttccaaaagaaaactgatgtaactgtattggcatgagacaaagtaaacatcaaagccagaagcaatactaaagatctagggacacttaaaaattatgaatgggtcagttaaccaggttgctttaataattcaattctataaatacttaataatgtagccttaaaatatacaaagaaaaatgggcagaatcaagggaaaaattaagtacatggtaatcatggaagacttaacaagtagctctcaattaatacaacaagcagagaaaacctcagttcaggtgaagatttgatcaagattaacaaacttaacctagttaataaacttgacctaattaatctaaatagaacattgtacctagtaactgctgaatacacatccaagtgaatatggaccatttaccactactgccgtaaagcatgtctcaacatatttcagaggattagaatcatgttttttgaccaaggtggatttaatctagaactcagaacaatgaaagacatccagaaaaaatcctcaaaagcttggaaattaagcaatacacttctaaataacccatgaatcaaaagaaatcaaaatgaaaattagaaaatattttggactgaataataatgaatatggtacgtatcaaaacttgtggaatgcagctaatgtggtgcctagaatgttagctatgtgtgtatacatatagctacattttatatacagctaaaattatatatattagaaaggctgaaagtgatctaagtagccatttcaagaaaaacaaaaaaaccccagcaaattaaaaccaaagaaatgagaaagaaaagatgtaataaagataagaacagaaactaataaaataggaaacaaatgtataagaggatgaacaaagctattctcttcgaaaaaaattaattaaattgataaccttggcaagactaattaagaaaaaaggggggaaaataactaatgttagcaattaaaaagagaaaccataatagagcctctgaatagtaaaggggttataaaaagatactatgaatgaccatgtacccacccccccaccacagtaaaacatttagatataataaaaaatccctaggaaagcacagcatacaagaaaggttgagacatgtgaatagtatcctattaaattgattttttttttgttttgagatggagtctcactctgtcgcccaggcaggagtgcagttgcgtgatctcagctcactgcaacctctgcctcctgggttcaagcgattctcctgcctcagcctctcgagtagctgggtctgcaggtgcgcaccaccatgcccggctaatttttgcttttttttttttcttaagtagaaatggggtttcaccatgttggtcaggctggtctcaaacttctgacctcaggtgatctgcccgcctcagccacccaaagtgctgggattacaggcgtgagccaccacgcccggctgaattgaatttgttattgaaaaacctgctcatagataaatctcttgggcccagtagacttcattggtgaattctaccagacattttaagaaataagtaacatgaattttatataaaatattccagagaacagaagaaaagataagattttcctaactccttttatgaagcatcataatctttatttcaaaacttaacaaggatgtagcagttaaggaaaattacaggccagtcttatgtgaatgttaatataaaactgttagtcaaaatattaacaaactaaatccagcaatatttagaaattacatactaacttaggtttattctagtcattctgggttgtttcaacattcataaatcaacataattcatcatattatcagaggaaaaaacaccatagttatctcaatccaggaaaagaatttaatgaaattcagttatccatttgtgataaaaatattaaaatcccttagaaaattagaaatgttaagggaatttccttaatctagtaaaatggtatataagaaacatagcaagtagcaattaatgtaacccattgttagaagctttccttcagagattgtgaatgagacaaggatgcccagtatcaccactttttttgttgttgttattgtagtggaggtgtagctagtgcaataaagcaagaaaaataaataaaagacataaggattagagaggaagaaataccactgcagtaattagcacatgctttgttggtgtacacagaaaacccaaaaaatctatgtagacagaattaacaaatgaaatagtagatttgctgagttaaaggttaatttacaaaaatttattgattctttgtaccagcaaaaagcaattaaaaatgaagttaaaaaagatacccttgacaagagtatcaaaaaagcaccaaatagagtaaatccaatgaaagaggtataagacctctgcacagaaagctctaaattatggagagaaattaaaactgatataaatggaagaatagatgttcatggatagaaagactcaatattttaaaggtattggtttctccaattttgatctattcagtattattctaattaaaactccagtatattttaaagtgaaaatcaacaaggttgattctcaaatttatatggcagtagccaaaacaatcttgatgaagagaaattaaggtggagcacttagggtactagaaaacaagatttattaaaaactatattaagacagtgtggtattgcaaggatagaaaaacagaccaatggaacagaataaagagtcccgtaacagagatcccacatatgtgaacatttgattcatgacaagatgacactgcaagatggtggggagtcttttcaatacatgtcactggatcaactgagtaacaatatgggggaaaaagaaagattttgacttctagttttataccatataccaaattcaattctagatggattacgaatttaaatgtgaaatgctgaagattttctagaagatgacataagagaaaatcttagtgccttggagtagggaaagatttcttaaaaaatagtgataaaaggttactaatttagactatattaaaataatgaacatttcatatatttacaacatacaaccaacaaaagataaagaacatctataaattaataagttaactgagtagaaaaatgggcaaaagacaaatagtcatttcacaaaggaagatatcaaaatgaccagcgagcatgtgaaaaggtgcttggtttcacaggttactaggaaaatgcaaattacaatcacaagataaccctaaacatacaccagaaaggctaaaagttaaaagactaataatactaagttactataggggtatgaaacagctcagtattttatcaaaaagagtgctgtacttttctgtgcaaatatttactttcaatttaattttgttttaaaaagcaacagtcaattcccattttcagtagtagaagatacacattttgtgtattttttcccatgggtattctggattgttcccccgttgggcctggaagtttggaaatggttgaacatgacttagcatgtttgctttctgctttaaacactaaaagtccttgtcttttcacattttacatttatgcaaagtacatttgtatttttctccttgcttatttcttttatattaatatattctgtttacatgcataatttttcccactttgttttattctagaactcttgtagtaggaagtactagaagatctgtgaatatcttagtcttgttaccttcattaacagctaatattctcacttctgtttaatgatcagtgacttagtattgcataagaatcaatagtccaattaactaaattgaagcgctaatttctccctttcagtgttactgaagttttattttctgggagggggatgttgaattccacattattgtttttagtgttttttcagaatcatttttccagaatactttttacctttttgaggatggactttttgcagtgcactttaactgtatagagtgtgcaaatgacatttcagctggacttgggggagctgttctggcattttggtttgcaaatcaaacatgcactctcttttagtctcttttctttgtatttcttctcattgtttcttttggatctggtactgtcatctgcatttcttcattaattaacaaatttgcctggagataatttttactgctccttgtcttaaaaacattttacttcctacctttctccttgtcaataaacaggatatatgtaatttgggatttatctaatctgttagtgatggatgaaaagactcaaagtgccaagagatcaggaaaattcagatcaatccaggcaggaggaatcattaggtgtgactctcagaaggacagggatcttcaagtgggtcacagggtcagactggcaaagcgttttcttctggatgtgggttcacaagggatataggtgattctagtgaaagaagagagccaaatgagagtgattgtgaagcgttgtagtcagaaatgtgattgtttttctttttttaaaatttaaattttattttaaattcaggggtacatgtgtaggtttgttatataggtaaacttgtgtcgtgggggtttattgtacagattatttcatcacccaggtattaagcctagtaccccttagttatttctttcctgattctctccctttaccctccagtaagcctcagtatgttgttcccctctatgtgtcccatgcgttctcatcacttagctcccatttataagtgagaatatgcggtatttggttttctgttcctgcaaaagacgtgatctcattcttttttatggctgcatagtattccaatgtacctcattttctttagtctaccattgatggacatttaggttgatactgtgtttttgctcttgtgaatagtgctgcggtgaacttacgtgtgtatgtgtctttctgatggaacgatttacatttttttgggtatatacctagtaatgggattgctgggttgaatgatatttctgtttttatatctttaagggatcaccatcatcttccatagtggttaaactaatttacacttccaccaacagtgtataagcgttctcttttctctgcaaccttgccagcatctgttatattttgacttttaaataatagccattctgaccaatgtgagatggtatttcattgtggttttgatttgtgtttctcttaagatcaatgatgttgagcatttttttatatgattgttggctgcctgtatgccttcttttgaaatgtgtctgttcatatcttttgcccagtttttagtggggtggtttgtttttttcttgtaacttttaagttctttatagatgctggatactagtcttttgtcagatgcatagtttgcaaaagttttcttccattctatatgttgttcactctgttgatagtttcatttgctgtaaagaaactctttaattagatcccatttgttgacttgcttttgttgcagttgcttttggtgtctttgtcgtgaaatctttgtctgtttccatgtccagaatggcattgctggggttgtcttccagagttttttatagttttgggctttacacttaagtctttaatccatcttgagttaattctgtatataatacaaggaaggggtccagttgcaatcttctgcatgtggctagccagttatcccagcaccgtttattgaatagggagtcctttccttattgcttgtttttgtcagttttgttgaagatcagatagttacaggtgtgcagccttatttctgggttctctattctcttccattggtctatgtatctgtttttgtaccagtgccatactgttttggttactgtagccctgtagtatagtttgaagttgggtagtgtgatgcttctaggtgtgttctttttccttgggattgccttagctattcaggctcttttttggttccatatgaattttaaaatagtttttcctagttctgtgaagaatgtcatttggtagtttaataggaatagtgttgaatctataaattgctttgggcagtatagccattttaatgatactgattcttccttccatgagcatggaatgtttttccatttgtttgtgtcatctctaatttctttgagcagtgttgtatattttttctatagatttttcacctccctggttagctatattcctgggtattttattctttttgtgacatttgtgaatgggattgcattcctgatttggctctcagcttgactgttcatggtgtatagcagtgctgtgacttttgtacattgattttatatcctgagactttgctgaagttgtttatcagcttaaggagcttttgggctgaaactatggggttttctagatagaggatcatgtcgtctacaaacaggaatagtttgacttcctctcttcctatttggatgccctttatttctttattttgcctgattgctctggccaggacttctaaaactatgttgaataggagtggtgagagagggcatccttctcttctgctggttttcaagggtttccagcttttgcccattcagtatgatattggctttgggtttgtcatagatggctcttactattttgaggtgcgtttcttcagtacctagtttattgagagtttttaacatggaagggtgttgaattttatcaaaagccttttctgcatctattgagataatcatgtggtttttggctttagttctgtttatgtgatgaatcacatttattgatttgtgtctgtcgagccaaccttgcatcctagggatgaagcctacttgactgtggtggataagctttttgatgtgctgctggatttgatttgccattattttgttgaggatttctgcatcaatgttcatcaatgatattggcctgaagttctctttttttgttgtgtctctgccaggttttggtatcaggttgatgcacaacccatagaatgggttagagaggagtccctcttcctcaattttttggaatagttttagcaggaatggtaccagctcttctttctacatctggtagaattcagctgtgaatccatctgaccctgggctttttttggttggtaagctatttattactgattcaatttcagaacttgttattggtctgttcaggggttcagtttcttcctggttcagtcttcggatggtgtatgtgtccacgaatttatccatttcttctagattttctagtttatgtacatagaggtgtttatagtattctctgacgtttgtttgtatttctgtggggttaggggtgatatcttccttatcatttctgattgtgtctatttgagtctcctctcttctttattagtctagctggtggtctgttttaattttttcaagaaatcagcttctagatttgttgatctttttaatgttttttcatgtctcagtctccttcaacttagctctgattttggttatttctcatcttctgctatgtatgtcactgcatgtgagatgggtctcttgaagacagcataccaatgggtcttgattctttatccagcttgccattctgtgccttttaattggggcatttagctcatttgcattcaaggttagtattgatatgtatggatttgattctctcatgatgatgttagctggttattttgcagttttttgtgtggttgctttatagtatcactggtctgtgtactttagtctgtttttgtagtggctgttaatgctctttgctttccatatgtggtgcttccttcagagcttagtttggccagataatgaaattctgggttgaaatttcttttctttaagaatgttgaatatgccttcaatctgttctggcttgtagggtttctgccaagaggtctaccattagtctgatattccctttataggtgacctgatctttctctctggctgccgttaacatttttttccttagtttcaaccttggagaatttgatgattatgtgtcctgggaatgatcttgtgaagtatcttactggggttctctgcatttcctgaatttgaattttggcctctctagctaggttgggaaagttcttatggatgatatcctgaaatatgttttccagattggttccattctccccatctctttcagggacaccaatgagttgtagatgtggcatctttacataatcccatatatcttgggggttttattcattccttttcattctttttttctctattcttgcctgtcttatttcagagagccagtcttcaagctctgagattctttcctctgcttggtctattttgctattaatacttgtgattgcattataaaattcttgtggcatgtttttcagctctatcaggttggtcatattcctttctatactgtctattttgtctgtcagtgactgtcttatttcagaaagccagtcttcaggctctgagatttctttcccctgcttggtctgttttgctattattacttgtgatttcattatgaaattcttgtagtgtgcttttcagctctatcaggttgcttacattcttctctatactgccgattttgtctgtcagttcctgcattgttttatcatgattcttagcttccttggactgggtttcagtatactcctgtagctcagtgttctttgttcctatccatgctctgaattatatttctgtcatttcagccatcttagcccagttctgaacccttactggagaagtgatatggttgtttggaggaaggaagatactctggctttttgagttcttggagttcttgcactatttctttctcatctttgtgggcttacattccttcaatctttgaagttgctgacccttggatgaggtttttttttttccttttaccatatttgatgaccttgagagttttattgtagtataaggtggattcagccaactggctttgtttctggaagattttcggtggccattgctcagcccccaactcctagactgtgtgctctaactctgggggggctcgtattgggccccaacttttttctctggctccttgaagttaggaatccactgcattggggggtcagagtgctcccagaccactagtcactacaccacaatgggtggtggcagccaaagcatttcatagtgtggtgacagtgggattcatccttgtttacatgtgccagcagcagtggtagcagcagtgcagtgggggacacacttgtcagctatgccagggtgctggtgggtgccagggtgcctgcctccctgagagcattcaccacagtggaggaggcaacacagctgggaggtgagcggggacccctgctggcgactgtgcacagtggcactggtggtggtgttggcttgggggcagggcgctggcagttgcaggtctgtgtgccttctctgtgtactgcaaacaggagtggttgctccatgcaggggaggatctgttattctctgtgcctagtttcactcctgcggcagtgttggtgcaaggaaggggcactggtggaggcagggctggctggtttggtgcccaccaaggttctgtctgcagtggtggtcagtggggacatgggaaatgaactgcactcccgccacagcagtgtcaaggtggatacatgtacacttgcctgctggtggggcaagaaaagcaaaacctgccggcataggcacatgccagcaaagccatgtggggagttgctatgggcctagggaagctgcagtatggggactgaatgtacaggctggtgcatagccatgggggccactctgctggagctctctgctggtcaggcatagtctgccagcacagaagctatgatgcagtcccccaggccacccaaggctgccctgtaagcatgtgtggccaggctggggccctgggagaggccagcaggccaaggggtggtcagatgagaccggccccatatgatggacaagactaccctgcagagttcgggtccaacagttgccttagagctaaagtctcctatgggtgccagttaagcctaaggggatggctatccctggccatgccccaccacagattctctcacaccaaaccctctgggctccatatcagctggcttgctgcccctatcacttctctaagtggctcaccctgtcaacttgagtgttcatggtgggcgagaggttccagaggcccgtggcaagagtgggttgctccttgctagttcagctcacttgtttttccagagctgtttgggccaggaatgagtccaggtgcgtagtcgcctcatgtatggttcccagcttcctcccccttcagcccagcttctgtgtcttccctccatccactcttcagtgaccccctctgaagatctgttaggagcacaccagttgtctcagtccctcattggcagcttttcctcctggctgtgtctagtcagccatcttgccctccccctggtttttttctcccccgttctttgtcttcaatttttaaaaaccttggtcaaagaactctttaggctaagtttgagaactccgtagtcagcttccatgctgttagcagatcttatgaaatcatttaaagtttttataattctgcaggtgggtcttgtctaacatgtgatagagggccaaaaggccacactactgaaagcttaaggaggggtgtgtgtgtgtgtgcgtgtgtgtgtgtgtgtgtgtgtgtggtgttttgagggttgccttttctcttggttgtggtatgttaggagtaatggctgttacatactgatgtgcttgatgtgctttgtctttacgggttatagcagtgtagacatgagtctccttttgggataatctgtttcccttttttcttctgtctttgctaaaagctattgctcatttctgctgagcattgcagttaccccttctacctaccatactttctaattttggatcttctggtggattgtgggctaggaaatacgaatagttaagactcttcaacttgttttaatcaaacagatgagtcctcatgatctttatcaaagcaaagtaggtgggcttagggtcagcctcttttcttttcttttttaaaatgttcttttcttgctaataaaagcagtagccattggagaaaatttagaaaagaccaactatgaagcaaaacataatcataataccttgaatcagagttaatctgtattaacatttggtgtatttcctttaagctatgtaagtagacttcagtaaaaatccttcacaaaattgggattttagtatagtatactttttatatcgatatgtcttttaaatggtaagcatttttcatgttaactattttaatacagcttaatgtttgcatattttattatgtacattcattcattatattcattcacagtttatttataaacatacagattttttccaatttgtccagtttttataaaagaacaaatccccattgactttttttttttttttttttgagactgagtctcactctgttgcccaggctggagtgcagtggtgccatctcagctcagtgcaacctccacctcctgggttcaagcgattcttgtgccacagcctcctgagtggctgggattacaggcacctgccaccaggtctaactaatttttgtatttttggtagagatgaggttttgtcgtgttggccaggctggtctcaaactcctgaactcaagtgatccgcctgccttggcctcccaaagtgctgtgactacaggtgtgagccaccgcacccggccccaacaaattcttaacatctacatttattttcttcttttccttttttgtagagaaagggtctcaccatgttgcccaggctggtcttaaactcctgggctcaagccatcctcctgcctctgcctcctaaagtgctgagattacaggtgtgagccactctacctggctctacatttattttttttacatggatttctaaaagtagtgtttaccaagtcaaggttaagaaattttttttttttttttttttttttagacggggtcttgctctgtcgcccaggctggagtgcagtggcacgatctgggctcactgcaagctccgtcctctgggttcacaccattctcctgccttggcctcccgagtagctgggactacaggcacccgccaccacacctggctaattttttgtatttttagtagagatggggtttcaccgtgtgagccaggatggtcttgagctcctgacctcgtgatccgcctgcctcagcctcccaaagtgctgggattacaggcatgagccaccgcgcccaacaaggttaagaatatttataagtgttttaatatcgactcccacattgctttctggaaaagtcatgtgctttgtatttcagcactttatgggtctttgattccagataacttacccgcacaagtttcgttttataagatctttgctaatttgatagatataaaatgccattggatgttttcctctgattgctagtgaaattaagccttttttcatgtttattggacatttatatttttgtgggaatcattcttgtccttgagttatttttctgttgagagcttaatactttttacaaatttgtaagtcttttgtgtactaaaagttaaaagccctttgatttttttgtaaatatttttctcaatttatttaccttttaattttgttaattggattttttaaaaatagaagttttacatggttaaatttatcattttaaaattactttttcattagttttaagctcagaaaatttcctttcatccagaaattcagttacatcattcacttacatctttttttaaaactagacttttccattttattggctgtatttacccattcttccagtttgaactttagaatgactttttcaagtttcttacaaaaataaattccactataattttttattggaattgcatttagtcctcattcttataagtagcttatttctagtactttaaaaaaatttactgttgtagattgtgattgtttactcccttgtgttccctgttttccctctccctccctacttaccagtagatgaaattctagctggttattaaaagaaatactgctggatacttgtggaggtgaaggcttggcagaaaataggtgtcactggtatcaaatcattgaaaagtgggttaggataacttccttaccatggttggtggaactcgtttctctggagttgggtgaatggtaaagcaggcacaaacctccttttgttttcctgtctgacgttactattctgtactttattgtagagaaattattcctaaggtcttctagattttttatgaagtattgttggtttccaggactctcaacactttatatttcttattttcatgagtttttttgatgaaaagggttgagtaggataatcagacagagagacacagtttcggccgggcgcgatggctcacgcctgtaatcccagcaccttgggaggctgagacaggtggatcacgaggtcaggagttcaagaccagcctggccaagatggggaaaccctgtctctactaaaaatataaaaattcgccaggtgtggtggcatgcgcctgtaatcccagctacttgggagaccgaggcagacaattgtttaaacttgggaggcagaggttgcagtgagccaagattgcaccactgcactccagcctgggcgagagtgagactcccatctcaaaaagaaaaaaagaaaaagagagagagtcttcatctaaacctagaaattctaaaaactagctgtttgttcactattttttggcagtgtaaagaattcttaaataactaggtatttgacttcctaagaagtggggtatcaccatatatatgcatttgagaacttgaatttacaaataaatacagagattattttctatttttatatctcagggatgttatttcaatgctaatagtgaaaaatactaccacctttctgcttttaggttggaatgttgcatcagcaggtagaagaacatgaaaaaatcaagcaagagatgaccatggaatataagcaggagttgaagaaactacatgaagaagtgagattttagttttgttaaatgttgtgtgtgtagttctctctctttcacccttgagaactttgttaatgaaagccagtttctactttgtaaagtgggaaatacatactccatcaaagatacaggagtgggaatccatttctctgttctttaatccaggtaaagaggtttgcctaactgtaggtttgatactacctagaagagatgctaaaatatgtttcttggttgagtacctgaaagaaatagagctgtttttatgtaatactgtgaaatacttgataccaaaaattacatttaatattttaatttttatcagttactagattataaataatggaggatccaaagatttaagaaacattttgggataaataagacaagtaagaaaattctgtccattaactcaattttattcttcagatttggaaaaaactgcttttattctgatttaattgcaaagtactcttctcctgcatcctgaatatcagtgccctgcaagagcatggcttgagaatcacagacctagaggaaagaaaaagagtttttatttgctgctttattgtggggctgggtggtagggtctttaagtgcagggctattgtaatacaaaacttttgtttaaaattttttttaaaattttttctttgaatatatttctttagtagtgtttgttttacatatttaatttttagtttccttttgtgttttagtttggaaatctaacatgttctcagtagtactggttagcactgctcttgttttcataataccaatttgtctcaccactacttcttacaaattcttaaactttaaatatagaaataactgtttctacagttatgcatactgaagagaagctatgaaaagcttcagaaaaagcaaatgagggaattcagaggaaataccaaaaatcacagggaagatcggtctgaaattgagaggttaactgcaaaaatagaggtatgttcatagtaataatttgttcatagtgattgtcagccttcacgtaggaaaatgcggtttctaatggcactattttctggaaccaattttctactatcttaaggactgccactaagctatttcagaggtgagagggtgatccaccatacatcctatcatcatctagttccctgggttaacggggttactggccatcagtaattctcaacagggcagtaccacccttagggagcatttgcaaatgtacggagacatatttttttggttgtcaaaatgactgagcttaataaaactggcatttaggggacagggaccagggatactaaacatgcctaagagtgttccacacaggaaggattattgtacctcaaatgccagtaactctccaattgggaaacatgaccactagttataggcagtcctctatggacattgttcttgtcttatatatcattgtatctcaagcacctaataaagtgggggcttagtaaatgtggaaagtacatggcacttttcgtacaaagtaatctctgtatcagattattctcaattcccatttagatgtagtaaggcattcacttccttctctgctgactttgtttttattaagactgaataactccatgattattgtatatattgagaacttaaggggagctggtgagctaatagtaccaagagtagatgaaggaagagcacaaggctgtcattctcttcgtctgtccttgccattagttcttcactggacataagaattcccagggtgcttttaggctctcagaaatgctgatccagcagtatggcataggacctagggatctgcattgtatccagctcccctagcttattctgatttgagaaacattgttcaacatctttgtgtgatcacttacaagtttgtactctgggtgacctgtcacccacaaatgccagtatattattattacttaaaattataatttctgtgtttaatattcctttatatctcaatatttttttacatttgaagagcttagaatcagaagactgcagctactgcttcccttccacccttttcggcaataccttttccccccaaaccctatatccttcttgcttctcattgccacttcctgactattctcttttctttctacctcaaaaaccccatctttgattttcatgttaccagcctatactgccagccaatgaacataacaaccaaaatagtcatcgtctgacctctgggttatttccttggctcattgatttcagcacccagctcactgtcaattctctctgacattactcttatcataactttgaggatcttaggatctggagagatgatgcttataatactctgaccttacagtttcttggctttctttcctccatagatagtttgattatctttgtgtctcatctacttattcccactgccattccttagctcttgtcattaccaatatatgccacccctctagaatctcattttcaagcattcaattatcagactaccaatccctatcttttcagctaactctctctagtcctttgactctcagtaatcattaaccatcccttaaaatgattaaattctgccacctttttactgctccattatctacttggtgttctcacttatcggtccttagccagcttttaaattctgtcattacattttttactttccccttcatctcctgtgctcctctcttgcttcctcatatttgcttggcagaatcacagttctgcttaagtccacctttctgcccactctctacctgtcatgtatcgctgaacgtggctagagaaaaacctaatcatactgtctgttctcactttaaattcatggtcactaacctcaaatgggtcctaatgctacctggaatcatactgtatttcctctcatctcctactttccacaatgagtatttcagacttctgcttttctcctcaaactctcaacacctttccccacatcctcacctttgggttatatcttcctttctgtttatagacttccaactcttgtgtccacccacctatctgcatctgtgcccatgtaccctgccttccttcctggaggaactacgcatgccctcccccttttctacccaaggcattaccttagcagttcaccttctcttttctgcacccttaattttttttctctactggatattttttaccagcatccaaatttccctcctcttaaatatcctctcttgacccgtctcttcctcctctgccccattttatttcttccattttataactaaaaaattacttcagtcatctatacttgtctccagttcctcttgtctcattgttcttgtacccactcaataaggcttttgtcccctcacactgcagaagctgttcacatagaggtcaccagtgacttccacattcccaaagcctgtgggctggtccttatcttcctcatcctacctacagctttgtaggagagctggtctctcccaactccttaaccactttcttgacttggcttgagaaaaaccacatttctctcattttttccttgttcatcactcctcagtctccattattccttaaccacctagggtcatgtcattggacctttcctttcctttttttttttcctatctacgctcactcccctattgatcccattgaatttcatagctttaacactgtgtatatgctgacaattcctaaatttatatatctagccaagacctcgcctcttcatgacagaataactttcaactgcctgtttcctatctccactatgatgtctaaaatgtgtcaaacttaacatgtccaagctaaaggtcctgtctttctcttcctcatctccccaacactgattcatgttttagttgataacaactcaatttgctcaacctaaaacctcggagtcatcctagacttctcttttctcagcatgatagccagaatgattctgctgtaatgtaagtcaaattatatcacttcctatacaaaaaccttccagcagcttctcttaaaaatctgttatcctaatggcctacgtggtctcattcccagttatctctcttaccttgtcttctcctactttccctttcattcactttattccagccacaccaatttcctttctcacccttaaacacaccaggatgctcttatttcaaggctattctttccacccagaatattgtaacttcaccctcatctccctaggtgtttacttaaatgtttttcactcagtctggccatcccttttaaaaattacaaccccaactgtgaagacttcatgctctgttttctccaaaacgtgtattaccatctgctataccatacaagaaatgtgtcatctgttgcccccagttgagtaggactagggtttttgtttgttttgttaagtattgtatccctgactcctaaagcagtacctggcatatatagtagaatgattgaatgaatgaatgaatatcagaaatttggttaacaacacttatcttaaggagcctgagacttctggagttgagggtcctggaagacagtgatagaaagattgagtttcctttccctttgatttgccccattttcataaatattgaaatcactttcttgatcatgcaatttgatgttactattgatccatcattaattttgaactgtttggctttgggttacaaatatttgttaaaatttggtacagattttctttgttattcaaacttttgcagttcctctgttgagataatacaaatttggatatcaaaggatattgtgttatctgaatctacttggttccttagttttagatactgggaagtaagatttgggttaccaagggacttatctgaaaatttaatctgttcaattcctgggtctggatatcaagaatttggatagcgagggatatctgtaatcatactttaaaattttagttatcttagcatcagttttctgaaaattcactagaaaattataacaacccttaggtggcagcaaatcagtgaaaaacatctgaatccagtgcttaacatctgcgtgtcatactcctcaccatcagggtgttaaatttagaaagacagatatccagaggcacagtatgtgaggaagttagtattactctccagctctgttagctgagtgagtaatggggctcccgctgtggagaaaggtgcaagcgtacccagggacatggggagaaattaaagttaaagggagtctgggaagtagtgacagtgaggagaagcactcagaaattaagtactctaattgcctcctcaggaattccgtcagaaatcgctggactgggagaagcaacgcttgatttatcagcaacaggtatcttcactggaggcacaaaggaaggctctggctgaacaatcagagataattcaggtaggcctaagactttttaaaataatgagaagcagataggttttgatcaagtttgaactaccttaatgcagtgtcctagtaccatttagcctctttcagcttctctccacgaaccctgctctcttgtttaggaagcctctcctcagcatctagactcagctccttcttcccgcctgccctcacacatgcgtgcattcactctcctgtccaggctcatgtccttgtgcccgcttgctgctttgcctccttgcttgtttctgacttgctcacccactctctgtcattgtcttgcttactcaggctcactctatgcttgcatccatgttcactctcctcatcttggtccctagctttgtcgccctctcttcctcccctctctttcttccctaccacagtcccattcctccctctgtctccttttccatgtctttctgtctcttgttgggtctctcagctctactatagtctgtgccttgctccatccctatggtcactggggtatcttggccgaagtgtctcagctagggagcttcagttagtctgcctatgcggacagatacggagagagtcacatggcaatggtgtgcacaccaactaaaagtggtgtctttgtggtaacaaaaacacttattttagaacattgatagaaacttttcttgtaatggcttaagcaaaaccaaaaaacagacacctactttaggaatatgtcttgtaagaacatattcagctcattcctttttcagttagaatcaagaacataaaggaaactaaaaaaatttgtgatcatctgttatgtgctagacattgacccagtgcttcttgtatgtgttctctgtttaatattatgataatctgtcaaggttggtagttatcttagttttatagaatgagggaacagcctgggtaagttgaaatagctagaagggagggttttttttttttttttttttggctttttgggtttttaaaaataatctgcatttatttgctattttaagtctcaataatgcattaactttttgttcgtctccctgaaatatcagcagtctgataaactaccgacagtggctgtggctctgctgtgagtgacttcattcaaaatggtaggaaaagtccacaacaattgcaaggaagaaatttattttctaggccacagcaagctgtgcagccagacagaccagtgaaatcctgagatgtctggaccagtttttttgacttgaatgccaaagcaccatagagacctaataagaaattgtgtgtgtgtgtatatatatatatatatatatgtatatatatatttttttaacaacaaaaaattttttttggttttcttgagatgaggtcttgctgcattgctcaggctgatcttgaattcctgggctccagcaatccttccaccttggcctcctaaagtgctgggattacaggtgtgagccaccacacttgaccaagatattgttatattctagttgtagccttcagattgacaaaaaagcaaattgagtcttaatttttacagttctcaattatttatccatggagtattattgattatagattctctcttcaaattactgttatcctatttcatattactgttgtgattattgactctatgtaattaaaacttcattattagtaaaaatgggatttttacttactgtaattcagctagggctagggtaagaagcctttcaacagccaacatttgtttttcctactaagggtgtttgaattaattcttctgatagttttgtttaacctaaaactgtctgattgtttaataaaaatgttacatataaatgtatttatccttctcccttagcaaactaaataaaattaaatctttcagtgattcagtatataccagtgctgtatgatcatcatttttttaaacatctaaataaacttatctatatccattaagtagcattaatagttgtcatcatcttgtcaatctttattttaattatggtaaaatacacataaaatgttccaccttaaccatttttaaatgtatagtatagtaatgttaactatatgtacactgttgtgcaacagatctctagaacttttttatcttgtcaaactgaaactctataccattccctacttcttatttttgggtggaatattacagagcaaatcatagatatcatcttatttcccaacaggtaaggacttaaaaaataacaatatatcagtatcacattaatagaataataacttcttaatataatttaatatccagtctgttcacatttctccagttgtccagaaaactatctttttacaattgaatgtttgagtcagaatccagtcaaggttgatgtattgcatttggttgaaaggtgggtcaccattgaacaatgacagtagaaaacctgggaggctgagtaagtggatattaacctaccctccattaaaaaaaaatctctgtataatttttttcttatatgtttttaacatctaaaagtataattcggaaacaacttctccttctttgacatatgtttgcttgaattcatttcttttaatcagctattaaaattacataatacatgcttattttagaaaaatgagaaaatgcggataaaatgagaaataaataaatcacccataattctaccgttaagagatttacgatgaataaaattttggtgtaaatttcttctgactttgtgtatgcttacatacagtgtgcagtacattcatgtacttttgataggaaaaacctatatgcactgtgaatgggaaaggaggggtagttgcaaactttaaaaagtcctgagagtagcaaagtgttgataatttttgaagctgtgtgataggggttcatcatcttactctctctatatttgtgtatgcttgaaattttccatgaaacaataactttaaaatatatagaatgcttactaagtgacaggtactatgctaagcacgtcacagctttaaaatttttcctttttaaatatgacatgtcaacagatttgtagtcataatgattgtgtagaattcccccctatcgttaaatgtataatgacatttgtaaccagtcccttattgtagaacatttagttttttacttttcacttttgtaaatagtgcttagattaacatccttatataaacatttaggagtatttattttcttaggaaatggccctagaattggatttactgtatcagagtaccttcaaatattttaatatatattgccaaagttttctccaatgatggattgatagactttctctagcagtatgtgagaatatccatttcctcatactttccccacattgagcgctattatttcttttgactttccccacttttaggcttgtctttgccaatcttataggtgaaaaaaaatgataccattgttttaatatacattgttttaatatgagtgaggttgaggacttttttcatctgtttatggccatcttcatttttcataaattatttgtgtcctttattcacctttgttttaggattttttttttttttttttaaatcttaatttattttcttttttgagatggagcctcggttgcccagcctggagtacagtggcctgatctcggctgactgcaacctctgcctcccttcaagcagttctcctgcctcagcctcctgagtagctgggattacaggtgctcaccaccacgctcagctaatttttgtattttcagtagagacagggtttcaccatgttggccatgttggtcttgaactccagacctcaagtgatctgcccaccttggcctcccaaagtgctaggattacaggcgtgaaccatcgcacctggccggatgtttatattttactattctgaaagagctttccatacacttaagtatgaaatataagccctttgctattatgttacagttgcgtatgtgtactcaatttaccttaatttttgcccagtattttttatggaagtacaattgttttataaacagttaattagaattgcttaattctatcaattttttgttcagcgtttctatctttgatatcatactataaagtcttacctaagtcaaatttcttctaatgctttatcatttctttttaatacattttatctaaaaattactttagtgtaaggtatttgataggaatctaaatttgttttttaaatggttatataatttactgactattacattttcaggattggacaaaatgactctaaaattcatatggaatgataaatgaacgatactagccaacttttttttttttttttttttttgagacggattttcgctcttgttgcccaggctggagtgcagtggcacaatctcggctcgctgcaacctccgcctcccagatcaaacgatcctcctcctcagcatcccaagtagctaggattacaggcgtgcaccaccatgcccaactgattttgtgtttttagtagagatggggttttactatcctggtcaggcttttctcgaactcctgacctcaagtgatccacccgcctcagcctcccagagtgctgggattacaggtgtgagccactgcgcctggccaccagcattttttaaaaaggagtaatggggggatgtttgttctatcaaatattaaaatgtattttattaaaaagtacagttgttaaactgtaatgctagatgtaacaaaagagtcgtggttatatagtataggaaaaggatcagtacagtctaaaactaaggtcatttctgtttagaaggctactttttctgttgcctacataatgcaaaggaaatgttcaaggaaatcttagagaacagtaagaacatttgaaaaaaattaaaatattaagccaacataaaatgtaaaatatttaactgataaacagtatgtgaaaaaagtagaggttgctctatgttttccttttgaaatacttagatgagctgtaaaatattcttcaagttaattttaaatccactgttaattatatgtatataaatatatttatacgtatatatgttgtatttttaaaagcatccttttcctgtcacaacttttgaagaaaaaaatgaccctaactcaaatgttgatctgttgtcttggtagaattatcagagttaattgaattggcttagacctactgtttaaaagttcgtagtagcatagacacaacagtgataagagaatcttactaggagctgtgttgttaataggctctttaggctgctctctagtggaaatgctgtgaggctgtggcctgcactggcgcatttggagttgacagtgatggggagcttggtaagggattgatgcttacaatggccgtaccttcatactgggattctttggaaaataaaaagccttgttgcttcatatcacattgttcatagtaatctcactctctgggagagtcattttcttgaagcaccaggaagtagctatcacaaatccagaagaggatttgaattcaacccccactccccaatttcttctccactctctttcacactttagctggccacactggccttttgtttcagtttcagtctccctgatgtaaactgccttcttgattgcttctttacttttaaccacctctgctgtgatttgtattgttgaaataacttctacccactccaatagaatgctaaatgttagattaataagaggaatgcctgtttctggctcaaagaattagtggttagtgcaaaaaaaaaaaaagtttaaaaatatgccagccttaaaatacctctaaagccagataattatcagaaataatcattattttagaagtttttaaataattatttctgactttcttagtattgatgaagtgttcttgagattagtgtagtgctaatagatattggtgagtcacatgtaatttaaaattttctactagtcacattaaaaagtaaaaaggtgaaattaattttaataatatattcaactcaatatgtcagaaatattacaacatttactttacatttttttaatgagtctttgaaatcttcaactgaatttgtattttacggttaagagcacatctcaattcagattagccacagttcagttgtgcaatatccgcgtgtgggtgactgcaatggtattgcagccctagtgcattctaggcaatgaaaatttagaatttgtacttgagttgattaatgtacttttcactatgcttaaaaaacactgtatttttgtgtgaccaaaatagtaaatcagtgaaagaaggttatgttctccattcttcaaaactgagaagtttattagtatttagcaaatctagactcactggttaaagtatgccttggtttaactattagtttattatatcaatactgagtttaagatcacagatttgagttgatagtgttaggtagctattacagtattaaaaagatagtgttttgcaattatgtattatctgagtgcccattttggcagtgggtttctagttgtgttttgctgagacccagggctgctgtacagattaagggtaggactaagggacatttcagcaagctgggctctaacccttttctccttctcaccctcacccaatatctgcatttatttattctgcacaggaaacctttcctctttgaaagaaaagtttatattatatttaaaagtttggagacagttccatgcttagcagttgttctagtgaatctaaacctaaatgttgatgttcttcctttataccattgtagggatctggttaaaaaaaaaaaaaggctctttgcactgaaatcttgatcggtaatttatacaaacagtatttgtctatctcttcacctctctcctaccctctctctggcttatgggaagtttttagcatctactttatttgactacagtatatagtacaggatttggacctgtactgtaaataataaaatctttaaatctgcaatagatagatttcccagagatatttctacttgtatttctaaagtaaaattgtgtgattttacctttagaaatatttcgagtaagggaagtttacctctacagattatttatattcatcttcaatgtgtagatgaagtaccagccaggatgctggattaaaacttgtaaaaactaaaaagtttggagctaaaacccaatactgctgggatgcatagcctaaaacatagtagtcagtaaacgtatcattcagagaaaccagtttgagatgcattatatttgtttacctcttttaactcaggaagtgtccaaaaactgatgacagaaccaatctctcctcccttataagcaccttttcctccaataaacaaaagaccacaatttccccatttctctgaatttaaagagcattttatggtcacgatgactaatctaaatatgaatgtttataatgttaaaacagaataattacaacatgctctaggtgggggggggaatttaaactacaaatttagtgattttgaaattctaatttctaaacttccatcagaaatataataatgcattatagttcctatttcctatgttttaaataggaaataattccagccaggttgcggttgaatttctgtgtgagtaggtagaatactgtagcatctcttctcctgaggaatccctttactttatccattcttttctatttatttatttatttgagacaggttcttactttgtcacgcaggccggagtgcagtggtgcgatcttggctcactgcaacttccgcttcctgggttcatgtgatcctcccatgccactgtgctcgggtaatttttgtattttatttgtttgtttgtttgttttgagacagagtctcattctgtcactaggctgcagtgcagtggcgcaatctcggctcactgcaacctccaactccctggttcaagtgattctcctgcctcagcctcccgatcccgagtagctgggattacaggcacgcgccaccacgcccagctaatttttgtatttttagtagagacgggtttcaccatgttggcaaggatggtctcaatctcctgacctcatgatccgcccacctcagcctctcaaagtgcgggattacaggcgtgatccactgcacccggccaatttttgtattttttataaagacagggtttcgccatgtttccaggctgatctcgaactcctgagctcaagcgatctgcctgcctcagcctcccatagtgttaggattacaggcgtgagccaccactcccagcctctcaattctttcttaccccttcgcaatatatatatatatattttagtgagccaatgctttatgtttttatggaaataatagtttcattttagtcttattcattgattattttatcatttcccttttacctattgattgatagtctgtgtttctaggctcagcttgtcaatcggaaacagaaattagagtctgtggaactttctagccaatcagaaattcaacacttaagcagtaaactggagcgggctaatgacactatctgtgccaatgagttggaaatagagcgcctcaccatgagggtcaatgacttggttggaaccagtatgactgtcctacaggagcagcagcaaaaagaagaaaaattgagggaatctgaaaaactattagaggtatgttttaaaatcactataattgggggaagtgtgtgtatgagtattttaagagagtgttattaagctagaactaggttctacaatccatactttcttccctactttataaatgatggatcagatattgatagttttactaatattgtgactttattacaatatttacaatattgtaatattgttacgtaacttatagtctgacttcctggcttctcgtgaaatagaaaaattgtaataatagctggcttagaaatttctgagtattttgcaggttctgcaggaattaaaaagaaggaaaattataatcatatttgacttttttgcaggctctgcaggaagaaaagagagaattgaaggcagctcttcagtctcaagaaaatctcatacatgaggccagaatacaaaaggagaagttacaagaaaaagtaaaggcaactaacactcaacatgctgtagaagctataaggtaaatttaatcttaaatattattcatcttagccacttaatgactaggtattaagcactaggcttatttttatttttatttttattttattttcagatagtctcctgttgcccagactggagtgcagtggtgcaatctcagctcactgcaacctcaacctccgaggttcaagccattctccaggctcagcctcccaagtagctgggactacaggtgcatgctaccacacctggctagttttttgtatttttagagacgggcattcatcatgttggctaggccggtcttaaattcctaacctcaggtgatctgcccacctcagcctcccaaagtgctgggattacaggtgtgagctgccacgcccatccaagcactagttttcatattgcatattcataattttatgtttgatcatattgtggattttcttaattggctttaacttctgagttaggtttttaaagtgttataaaattttgtgtggttaattttcttctgccaccagttagggtccctaacagagactctcatgtttagaaagttagaaaccaaggtcagtttgcatgcttggtgaaaatccaaatgtgcagggaattgtcatccatgtctcctggaggcctcactttgttggtggaataagttgtgattagtagctgcttatcattaatagcagccagccattgggctagccctcttgcttgatttaagtctgatgcacacttttatttttgccagaattctcctgtaacttttcagtttttttggtacagggtttcaagtgtcactgaagtgattttgccattttgtctttttcccttgaaaaaaggccaaatcccagttaagaagggagtaaattgctactttttgaagtatcagcatctcttgactctttctttcctctcccaatattctttttataaagcaggagacaaacttgaagagttccaaagaggttaccaaaaatgatggggaaacacagactagatgagcattatttttgtttgcagagataaaggcgttaacaatcatcctatgtctttccataggccacgggaagaatctctggcagaaaagaagtacacctctcaagggcagggggacttagacagtgtgctctcccagttgaattttacccatactagtgaggaccttctgcaggcagaggtgacttgtcttgaaggcaggtacataattatacacacatttcaaaaatttcaagttgttaaaatgaatttttgatcatcatattgtaaatgaatgtaatagtcatagtaaaaaaaataagatttttttctagtatccacaaatggcctaagttcttatttctttttttttttttttgagacggagtccgctctgtcacccagactggagtgcaatggcacaatctcagctcactgcaacctccgcctcccggttcaattgattcttctgccccagcctcctgagtagctgagattacaggcgtgcaccaccatgcctggctaatttttatatttttgtagagacggtgtttcaccatgttggccaggctggtcttgaactcctgacctcaggtgatccacctgccttggcctcccaaagtgctgggattacaggcatgagtcaccgcaccctgccctaagttcttatttcattgagaagacagaagcaattaaaggagaacctcttaatctttctgtcatcaaatctaccagtctgcccatacctgtgcctttctgcacttctaagaccaaccactccacttgtgtcctttttctgtagttatatcctttctcttctgcatcatcaagttctttctgtctgctgaatctatccactggtataaaatacgctgtaacatcacccatctgggggaaaaaccatcccttaatcctatgtctccgtcaagttatttccacatttctgtacttctctttaagaccaaattcttcaaaagagttgtctatactgactctacttctttacctttcacctgtttagcagcccttcacttaggttttcctccttgccacctcagaagcagggtaggaaggggtaacagttgacacatggtgatcctttttgttctgctgtggtgttgttacttccttgggtgttaattgaatcctgactaatgctataccatacccacctaaacacttgtcattgtcgtacttatagaattttttttggtttttcataacctctcaactttttgattgggaagagtgtgatatcttgttttaaacacatgaatcatgatcatttgtacactgacattttctgtatgtaaaagataaaattgcttttaacatgaactgttaacctttaggcaaacaacaagagaaatatcattttacactttttaggttatctttaagtaatacattttttgtttttacatttatttctggttttggaaaccagtaagtattttcttacttttatctacatgttaaatacacaaacatgcatacacacacatattttctgctttattccttttggaatacttggagtacttgagatagtctttgttattattgaagtatatgtgtactcttccgtttgactaaaattaagtttattatttttgacgttgggacaacagtttacatttttatcacagtttttttattgattggctttttagtaatattttaaatgactgaggtgatgtttaagatattggctggatattttttggatatcaagaatgtaaattagatagtccaatttataggtttcaggattttggttttaagtatgggatcttatttttgtcatacagtttggaatctgtgagtgcaacgtgtaaacagctgagccaagaactaatggaaaaatatgaagaactgaagaggatggaagcacataacaatgaatacaaagcagagattaagaaggtaaaaatctgcatacctaggattgcaaaattgtatgtgtttatggacaaagctgtggattgggagattataggggttatttttaatgagaaaaaaatgtagttcaagggaccacttgatatttaggagtggaagagtttgtggaatgtgcatagggaaagtgccttctttctttggcatcgcccctgatgcccaataaatatttttaagataattgaaggctgtcccctttgaactcaaaaactttattttaaacatgttttgatgaaaagttttctaaaagacatacactctgttgcttgcaaaaaaatatgaactgtcacttaatattttcttattgcctaaagatagtatttatgtattgtctcctgtgctatgatgtagttagtatccttgtcagctattgaggtatgcagagctgtttgtgtctatatgaatgggccctaactgtcctatttgtttgatttgtattttttgttacttctttaagattacttctagttccttacttcctcttgttctatttgttatcctgtggactaagataccatatgagcaaaacttttagattcacaactaaaaaaaagaatgaaggtcacaagtactctcctctaaattgtgtgcatggaccttgattctggtcctcagcacttgaataacccatctctccctgttttgaggtataataaatgattgtaggtataaccacctgaccttcagtacagatatgcaacttggtaaattgctaatttttctgcagatttaatttaagagaaatttaatgtcttgagataaggtgaacttttattttattagctagtaacatattattctatctaaatgctttctcttaacttttggtgctttcttttctgcttctttatagttgaaagaacagattttacagggtgaacaaagttacagttctgcactagaaggaatgaagatggaaatctcccatctaactcaggagttacatcagcgagatatcactattgcttccaccaaaggttcttcctcagacatggaaaagcgactcagagcagagatgcaaaaggcagaagacaaagcagtagagcataaggtgaagcctgaacaaaaccttttttaaatttgaaatttgttttaaagatggagttgattaaagacataattttcataatatttaattcagtgaatttttattagatacctgctttgagctgagagtatgctggctagcaaagagtttagtgagcatggtggggaggtgagagtagacacagacaagtaaagtgactgtatcagtggtgtatggtgagagtcactagagatcacaagcagcctgaatctagaccactcgctgcaaaggccttccagaaggtgtgatagcaaagctaagttaggagcaagctgggtgatggggaggaaaagtgtttcaggcacaggaaaatacagaggtctctaagagagagtagaaacacgcttgctgtggttgaaactagagtacaagtgggatgagtggaaggtatgagactggaaagcagggactggctgctgaagggctacgttagccacgtaaaggagttatactgtgaccttgaggtcagtagggaatggctgcaagcaggagtaaaattcagtggtccttaaatggagaataagcagggagacagagcacccagatgctgttacagtggtaagatggtggcctgagcagtgggcaagggaggcagagggaaatggatgaattctggagatactgggctggtaaaaatgactgggcattgtatttgattggcagggaaggtgaggtaggcagagttaaggaatggtgctccacaggatttaaacttaggcaactgatggaaagtgatgctttttaatgaaatagagaaaagacagggagcaagtttggtgaaggatgatgaatttgtgtgaaaagtacacagactggggaaactggtggagaggacattggtttgacacatttgtttggaataaaggctggaattttgtatgggtaatagtcaattccacagaaggcctggagttgaagattaaaatcaggattaggcatttagctgtggctgtcctttcttcatggtgacatttgaaaccccctgagagacttaatgattatagtgagaaagcatagcgtaagaagagaagtgactcaaaccaaacttaggatacttctcatttagtgtaaaaaagatgttggaatgaagcttaaaaaaaggagcagtgaggagggaaatcagatagtttttgccaagccaaggaaagaaggaatattttcaaatgggaatggtcaagcacaaaagctgaggggaatgagaactgaatataagttgttattttgtgaataaagtacaattccatgtgacgttgcaggtagaagccaaattggaggaggccagcacaggagaatgggtagggatttaaggggttcagtggattgaaactttgctgctttgtcacctgatttatcctattagaatgatatcttcatcccattcatgttcattcaccttaataacatcttaaaaatctttttagaaagtccatatatatatatatatatatatatatatatacacacacacacgtacatatatatatgtatatatatatataaatatgtatatgtatatatatataaatgaagaatatgacttagcctaatgaaaattccatgtggaaaaattttgtaagatgcatgtgatttacatgttatatttatttttttctgttttccccttttcaggagattttggatcagctggagtcactcaaattagaaaatcgtcatctttctgaaatggtgatgaaattggaattgggtttacatgaggtacataaatagaaacttaagtttttctactatccaagccttcaaaaaaattactttgtaaatatttacattataaagagagaattaagatcaacttagatccttttgcagaaattttctcaaagaaaatgaaggtaaaacaatactggaagtgagcaaaatatgactctccactccagcagcaggaagggtttttgtttgtttttttgagacggggtttcactcttgttacccaggctggagtgcaatggcgtgatcttggctcaccgcagcctccacctcccgggttcaaatgatgctcctgcctcagcctcctgagtaactgggatcacaggcatgcgccaccacacctggctgatgttgtattttcagtagaggcagggtttctccatgttggtcaggctggtctcgaactcccaatctcaggtgatctgcccgcctcagcctcccaaagtgctgggattacaggcatgagccaccgtgctcggccaggaaggtatttttttatattatgtatgtgataaaatttacctacagtctgtgttcttagttggaagaatgtatatgaaggacttagcatatagtacatagtacctgacacttagtaagtatgcaatacatcctagatggtggtattattattattattattattgttaatgattattatgtttgttatctttttagaaagtatattgtctttaaaataatttaattttaattttatttctacaagatattcacataataaaatattttagaatcttttatatccaaggacttttagtaggtgctataatgaacacaggctgaataagatagcattcttgcctttaagagagattttggatcagctgcaattactcaaattactctagcctttaagagactagagtaatctagtagcaaggataagaaatgcatacaagcttctgtgaaaccagagagaacatgattagccaacagtgaattacagtatagatgctcttttaactgttttgttacaaaattcctataatttgcaaaatgactcatctattctgacccatcttttcttggtgtaggtcagatgtctgaaaattgtataaatgcttttttcctgcatttccagagagtattcctccaaaaagatatatggttccaacatgctccctgtttgctctgaaaaattctaatttcacaatccaggattgtggatactggggtggaagaacatgcaaaagactattatagagtaccttatttcaactggaaaaatgggggactatttttgtaatctttcagaagggtaagattctccaaacatcatgacgccatagaggattttacaacataaaaatgtgaagtttctggatggtaaaaggccctattaaaaaagactaatagggagaaaacagtttataatcagacaaaaggttaatgtaaattattaatatataaaaattccctacaaagataataaggaaaagataatctagtagaaaaataggcaaagaatgtagatagatacctcacagaattaatataaatatctagtaaacaaagaaaactgttcaacctctctaataaagcaaaatagacattcttttactaattggtttgataataacctttaaaaactaatatatagccagtgttagaaagatgtaaggaaacagacttattgcactgtcaatgagaaagtgaattgatacggcctttctagaggacagcttagcaatatccatcaaatgcgtaaatacgtatagcctctaaattcctgggtcatgtgtgtttctgattttgatagtccttgctgaattgttttcagaatggtcttatctttttacattcccatggaaaccattctctaggagcaagtgtgcataaaatggtcattgaagtattgttcgcaatatccaaaattttgaaataaactatatttatttcaatggttaatttttgattttatgaatattacactgtcattgaaggtggcagatgaaaacactcatctgatcttgctctatcctcaaatccctctaaaactgtcatgaaaggatttatttttgttctattttatttttatttttttccttttattattatactttaagttttagggtacatgtgcacattgtgcaggttagttacctatgtatacatgtgccatgctggtgcactgcacccactaactcgttatctagcattaggtatatctcccaatgctatccctccccccttcccccaccccacaacagtccccagagtgtgatgttccccttcctgtgtccatgtgatctcattgttcaattcccacctatgagtgagaatatgcagtgtttggttttttgttcttgtgatagtttactgagaatgatgatttccaatttcatccatgtccctacaaaggacatgaactcatcattttttatggctgcatagtattccatggtgtatatgtgccacattttcttaacccagtctatcattgttggacatttgggttgcttccaagtctttgctattgtgaatagtgccgcaataaacatacgtgtgcatgtgtctttatagcagcatgatttatagtcctttgggtatatacccagtaatgggatggctgggtcaaatggtatttctagttctagatccctgaggaatcgccacactgacttccacaatggttgaactactttatagtcccaccaacagtgtaaaagtgttcctatttctccacatcctctccagcacctgttgtttcctgactttttaatgactgccattctaactggtgtgagatggtatctcattgtggttttgatttgcacttctctgatggccagtgatgatgagcattttttcatgtgttttttggctgcataaatgtcttcttttgagaagtgtctgttcatgtcctttgcccactttttgatggggttgtttgtttttttcttgtaaatttgtttgagttcattgtagattctggatattagccctttgtcagatgagtaggttgccaaagacaaaaaccacatgattatctcaatagatgcagaaaaggcctttgacaaaattcaacaacccttcatgctaaaaactctcaataaattaggtattgatgggacgtatttcaaaataataagagctatctatgacaaacccacagccaatatcatactgaatgggcaaaaactggaagcattccctttgaaaactggcacaagacagggatgccctctctcatcactcctattcaacatactgttggaagttctggccagggcaattaggcaggagaaggaaataaagggtattcagttaggaaaagaggaagtcaaattgttcctctttgcagacgacatgattgtatatctagaaaaccccattgtctcagcccaaaatctccttaagctgataagcaacttcagcaaagtctcaggatacaaaatcaatgtacaaaaatcacaagcattcttatacaccagcaacagacaaacagagagccaaatcatgagtgaactcccattcacaattgcttcaaagagaataaaatacctaggaatccaacttacaagggatgtgaaggacctcttcaaggagaactacaaaccactgctcaaggaaataaaacaggatacaaacaaatggaagaacatcccatgctcatgggtaggaagaatcaatatcgtgaaaatggctatactgcccaaggtaatttacagattcaatgccatccccatcaagctaccaatgcctttcttcacagaattggaaaaaactactttaaagttcatatggaaccaaaaaagagcccgcatcgccaagtcaatcctaagcaaaaagaacaaagctggaggcatcaccctacttgacttcaaactatactacaaggctacagtaaccaaaacagcatggtactggtaccaaaaaagagatatagatcaatggaacagaacagagccctcagaaataatgccgcatatctacaactatctgatctttgacaaacctgagaaaaacaagcaatggggaaaggattccctatttaataaatggtgctgggaaaactggctagccatatgtagaaagctgaaactggatcccttccttacaccttatacaaaaatcaattcaagatggattaaagacttaaacgttagacctaaaaccataaaaaccctagaagaaaacctaggcaataccattcaggacataggcatgggcaaggacttcatgtctaaaacaccaaaagcaatggcaacaaaagccaaaattgacaaatgggatctcattaaactaaagagcttctgtacagcaaaagaaactaccatcagagtgaacaggcaacctacaaaatgggagaaaattttcgaaaggatttatttttaaagcgcaaacccacgaggttgggaataataggagaggagacaatagctaaacattttgtaagggggaaagtgggaaggagggaaggaaggaaggaagggagggagggaacttgatatcccctaataaagtcaatactaagctagtagtggagaactctaagaactaaactgatttacaccacagaattctgtaaaggcttaggattcagcagtacttggttgagagactcttatcttatgcagtgattatctgttcatatttaagaattgagaactctcaggggaacttaagccagaccatgaccagagatgctgttcagcttaatttctcctgaaacttccagctatcaataatagtggtaatactgttctttctttagacagctagatgtgtgctcgctactcagttttcatattacctttcatattcatttatctgtagtaattgtttataaaataataacttagagaaatttttaaaacatacctgaatgaaggtaagcattatcattttttaataagtatgtttaatgacatcagacatcaaactggtgaaaaccttgtcagcagtttaagctttctctagttttgaaattacatacagtgtgaatatgttgtacatattatgaagaataattattagaaaatgcccttttgtattttaccatgtaggaagctgaagttacttgtacaaatgaatgtttgggttaaatgtctattttaataaattacctaattatcttaataatgaaagcaacagctctgataaattactgaccatgttttaaaaaccgataatagtttcattttaactcgtatgtcctgcagatgttcttctctgatattttatctggcattgacaacttgttgaaagattttgtagctcatagtcactacttgtacacagatagttcacaggtatattttaaagtttatgtttttgttaggaaaattatgtttgtcagaccactcttgaccagcttactttcataatttgttttttttttttttttttttttttttttacagaaaagaccaagctaaccatggtattaaactccaaagattaccataactttgcataatactaattaaaatattttgtcattagaaaaaaaatcacccagactaccattttttcaagtagtgtcttaccaggaaacacctagaattgaagagcaataaaatttatgataccagatcagaatagtaattcccactatatacttgaatcctgctttatcatgtccaaatttatatatgagtagataccaaagttgtagaaaagtgtttaagattagagattatttatttaaaagttgtccctgccagccagaagatttttctcacaactttttgttcaaatttctttccttgaactaggtctccgttttctttcattagtattctggggctattcaaccttcaccttcttgcagaagaaacatggctgctattttccttcttcttccctgtttctgattccctcttacagctttcctccatcctgattccatccttcctccaccttcttggaattccttgccacacaaggaagcccgttgtgcttctagtgttccactaccatttacttgaagaattctttatctctgttagtcttaggaggcctaaaaacaaagcttcattaaagccatagattaactacttacaactaaaaaacactgaattttccaaccagcagtatcacagatcacaggtattcttgtacagattaagtgactctagtattcttttttattaggcaaaagagatttcactagcagacctccaggagaattatattgaggcattaaataaattagtgtctgaaaatcaacaactacagaaagatttgatgaataccaaatctcagctggagatttctactcagatgtgcaaaaaacaaaatgacaggatctttaaaccaacacacagcagaacaactgagttcaagaatacagagttcaagtaaaattttttaaaagtttatttaaaatgtgtattggtacaatataattctcatttctttgagaataatttttgacttacagaaattaaatcttcatcaaaggactctatgtttaattctgaagtatagtgtgcacaagtaaagctatgatcatgttaaaaaatggctgggggaggtgtatagcattttcattaaagctttagttttgtacactctggatatcagtgtaaacaagatgtgtattacctgaggcttttcatgctgccttccacctcttcaaccccatttgcccataagaagtagaatttggctttttataaacagcttcctttgtctttttagtcaatttgttataggctgttaccgtaagaaataagcattcggtgaaaagccacttggcttcagctcatactatatggcttacatgttttcctacccaaagcctttgctgacaccctcacctccactcctacacccacccaatcccctagttaggttaggtgccttcttatgtgcacagcacttctcctgtcccagcactaaccacactagattactctggcagcttgtttgtctttcttgctataccataagtgtgtgagggcagggacttggtagttggaattggatatttggggcctgaatgaatgaaagaaatctctttctgatctgagtaggttgctcattttgtaaattgtagccttattagttaggctattaagcaaatttcctacatttctgttggaaagagaaaagttgctacaattttttatttgttttgttttctaatctaccatccaggccaacccatggccagcacagacatgatggaataaagactgagcactacaaaacagatcttcattctccaagaggacaagcgtcggatagtataaaccccatgtctagggtgctaagccccctgagtcctcaaatcagcccttgcagctccaccaggtctttgacttcctactctctatgtaaaactcattctttgccttcagcgctagatacaaatgaagccaatttttctgacactatgtctgagagtatgaatgaccaagaagagtttatatcttcggtatggaaactttctgatcttagtaatttgttagttttttaagtttgctttgattttttattttaagggtgaagaaggtgatttttttttccttactgattcttttatcataagtactcttcattattcttaggtatccctgtcatacagtttttgcttgtgaagacactttcggccaagactacttttcaaaatgttctgaaatatgttatacgtattcatttgtctttaacccttattggaaattcccttcttgcccttttcagtgatgctcaattttcttctggaatggttagttcaagaactgtctctggatgccaagatagtcctgaggcacaggcagtgaaggaggaaaagaggaactgctggaaaggagaaagggagtgtggagggggaggaaggctgtgcctctgatgtgtgcagagcatggcttgggggtcacagatggtggccctcagggcagaatgtgccttggacaccatgccggtcccttgctccttccattgctgggcaggctgcaccatctttttgccttctgcaccaaagcacttgccatgggcccttcatttcctgtcaccagctgtggccatatagatgtgaaagtgcagtatttctgacttattaatgtgctaccaagtccatggaaaggttttcttttatttttcaaaataagtcctcacttcactttcttcctaagtttagcagcaaaatttttttggcaccagaactttccctggcctgaactgatgtgttagtatgtatagactttctctattccacttagtgtgagtatccatgtgttttgcttcagaaatatcagtgtgtttggtgatgggatgttccctcagactccactggggtaatacagttgatcctcattattcacagattttgtatttgtgaatttgtctactccctaaactttatctgtaactcccaaatcagtatgcgcagcacttccacagtaattcgtggacatatgcagagtgacaaaaaatttgagtgaccgacttgcacaatcccagccaaggtcgaagtaggcagcactctgccttgttgcccctgcttatgcggaggtgaccatagggtggagatggacgggacagcgcagtgtagggaaagaagctcagctccatgccagctggatagagtctgaatcccagcttcagcaccagttagtggggcagcctcaggagagttaccacttctgaacctcatgtctctcatgtgaaataaaaaatacagaatctaccagaatgatttgttctaggatttaggattatgctctctgtgtggggtatgtgtgtatgtgtgtgtgtgtgtatttgttgtatgtgtgtattttccctgggccaaaaattctgtgtttgctaattcagtgttttgggtgactttatagaacacaactactgctattgtgaatgagtattgactgcatatggcatatgttctatgttacctttctaaaatcagaattctgaaatatcactagcctcaagggtttcagataagggactgtggactgaaaatttggaggagaaaaaataattgattttagctggcatctaatttatttttgttaaatttttgtgctttaaaataaaagtgacatacttaggtttttaaagtgagtttgaaataataggcattaactatggaagcatatataagtctaaattgaaacattcttcagaccaataactaatatatgatactttacattgttacaatttgggtcagaaacggagagatctgtgttaatttttgcagaacttactgatttttgttcttttattgctcttgtcattaggatgaaaaccaaaaaagtatcttcagaggaaaaaaatcaccttttaatattgctagttagaaaatgtcatgaacagtgtatcttagaaatataatattctacttatttacacatgtcaaaatttgtgtctcttccagtgttccttgcctgtatctccccttggttcaatagctaccagatttttggaagaggaggaactgaggtctcatcacattctagagcgcttggatgcccatattgaagaactaaaaagagagagtgaaaagacagtgagacaattcacagccttaaagtagcctcttaaaaaaatcactatcttggaaataaaaataaacaccaaagagttactgtcatctgaagtagcagctctttaaaaacatgaagagataaaattataaaaatgatacatctaaagcagtggtgaagaaagctgaaaaactgatacttttgataggcattttctctgcactggtttgtttaaaggacttcttccagcaataagttgaaagaataaaccactttgctagacttttttctcatacgaatatttattatcataaagtgatacttaccttgctgacttaaatgtgaatagctatgtactaattgaaataaggattttatgatacatgttgaaaataaagtaactgcaggaactttctttaggggaaatgtgtagaagcatggatttaggggtcaaacatacctggatcgatagactggttttgccacttaccagccaacggggcttgttatttactgggctggtagcccctcctagccaaggggctggtagtgtgtaaagtcaggctggtagtgaataaggggggggtgtgctaaagaaccttatcaagcagtcctctcttgctcaacactcatgcagaggagagaggcagggagggcaagggactggctgtcatgcacggtgcccatggaatatccattggaaataaatgttcatcgtctgcactgctgaggacaagtttagatgggagacaaagatctggatgttgatgtgccgcaggcatttgaaacgatgggagttgataagatccaccagggaggctgtggagagagagaggagcaggaggctgggtttggggccctgaaagatgccagcatctgaggatcacaggaaatagatctagcaaaggaactagaatgtgcagttacagatgagaaaggtcagtgtagtgtacttgccagctcaagggtgtggcctctgtgaaccctctttctgtagtggatctttcccatcagcgtaaaacatcctgttatttcccctttttaaataaaacctcagttttttttaatgcctctcttttactgctctgtatgtttgcttcccttcacccaaacacttctggaaagagttgtctgcagtgactctttccagttcctcaccccgccccaccgtagttctcttcctaaccctctccaacaccacttccatccccagactgctttcttgctcttgagttcaccagtgacctaatcagtgtctgagcatcattcagcacagttggactctctcttggcttctgtgacctggaacttctggtttcctctctacctcatcctccactccatctcatggcttttcctcttctaacctctaagtcagagggccccctagagctctgtcatgggttttctccctcagcattctcttccctagaagtttccattccattctcaagctcttaataccacctataggccagtgacccttacatttattactaatcttgacctctccccagagctgctgtcttagatacctagctgcttatgcgatgtcttcacttggatatctgacaaacatcttgtttccaagagagaactctttattctccctcttgctaagattccatatcaggacatagcattatgtttgccagttcctaggagttacttataattccttccttacccacatccgcatatccagtcatttgggaggtcctgtcatttcttcccccagaatcttatctcagacccaaccgtttccctcctgcacttctaccacctgatccagactacttctctctcaccctgattctggcagtagcctcctaactgatagtactcacaccagtaattcagggagcttctggagttatcctttagaaatgtaaatgaaacagtgtcaccactgcttcccttcagactcttccaaggcttctctttttttttttattgagacagagtctcactctgtcgcccaagctgcagtacagtggcaggatctcggctctctgcaacctccacctcccgggctcaagtgattctcctgccttagcttcccgagtagctgggattacaggcgcatgccaccaggcccagctaatttttgtatttttagtaggaacagggtttcaccatgttggtcaggctgatctcgaactcctgacctcaagtgatccacccgcctgagcttcccaaagtgctgggttataagcgtgagccactgcacccagccccaaggcttcttactgcactcagaataaaatccaaatgaattagtatagcctacagagtgtcaataatctgggcctaatcacccattgcatcatcctttactgtgctccacccatgctggcgtcctttctgtttattgagtgcagcaagctttaacctgttcgggtctttcatttgcagtttaccctgaatattccctttctcttacctcacctttgattggcgttttcccccttgcagacctgcactctggcatcctctcctgagcaagccttctttgattgctgcctcccaaacctgtttctccccatttctctagctcattggcctgtgttacttgcttcatagtgctcactactatctgaaatcatttcattacttgatttatgtttgtactgtctatttctgtctttagaattaaaactccttgagggcaaggactttgcttctctggttcatggtgggatcctcatcacccagcacaagcccaacacttaggagaggctcagctagtttgaaccaatggaaaatgccattcctgaggtgcaccacatcgtttcttttgtgttggtgtgcatgctgtccttcagtttgtctcctcttcccacaccctgtcatgtgctcctaaaactccccctttacttggctactttatctggcttggcaaagctttcccatatcccctgacccatgtcagggaacgtttctcctcattgctgtcatggcaccctgtgtgtggctctgaccagactttgctatccgctttgatttctgtctttcaggggctaagtcctgcctacatcctcagtcagcatgctgcctaacacataacagatcctaagcaaatattgggtggatgaaaatcactaccattcaaggcttcattgtatttatcagtaaaactgaaataatatctaatggggtcgagaagatttactgaaaatatatatttgaaagggctttgcagttttaagtactgtacctatgtgcattgctgttacattcaggagatttctgagttttagacagtcccaagcttcagcttaaaatctgtagactgcagcccgtttctgaaacgtttgtactacgtgttgactaggaggaacaatgacagactctgtagtcaccggaaatacttaaggaatcatgaggtactatgtatttccttaaattatactgttttttaaagctgaagtatctaatagttaatgggttgtccaaatttgtcagaacatttgactgtaatttaatgtctcaccatttttcaaaaagatatattaataccaaatattaaaatgtgtcaagactaaatctgagttagtgtcttaacacacattttccaaaatctgtccgtgatcagggtacccaaatgagatgaaaagattagggatttgtagtctacatctggtgtttacagataatgttttattgggcaagtcatctcattcttcttgtcctggattcccatgaattttcatctggattcctacgcagattttagctgaagagggcaaagttgacttcccactgtgggctggacattaccttcccttgcagactcatttgatctcaacaagtgtagaaaaaatactacaacactctgtttctgtgacatctgcttaaacccaaacaattcttaccttctctctcttacatacacataacacctggtaaactgtgggtgatgattttctgtttgcaaaacactcgagtccagtacctaaaagttgcagataagaaagataattataaaataagctctatggcatgagaacatacgttaagcaaacagttgtcatgaacagcactgaaatgtagaaaaagttagaaatgtgtcagcttgtcccaaaacagtttgaaatagtataaatgcatcaaaaagtaacaaacagaatcggggcagagggaaaatgagggctgtaaacattgattcactaatgaatctagttgtccagtccagttgctagaggaaggcagccaagttacctctgagcttcagagggggaaaagcagaggagaaaacatttacctaaaagttttatggtgcccataagataaaaaaaaaaaaaaatcatagacttaagaaaagcacagattttttttgtgtgtttgaataagcgttttgtaaagtatgtgagtatccagaagagaagtccaacattttcataactggtaataataatctgcacagctccccccacagtatgcttcactgtgggttgatggcataaggctgacatccaaattcagaggaaactgttctgagagggccacaaacatgattgcgtaaagctctcatggcctgaaaagggaaaatttagagggatgatagactgctttaaaccaatcttttgtaaaagctatttctccgcagtgcaattttgataattcagacatacaattcacatctttttttttttccctctctgtgaggaactagaatttgggaattttatgttgcccattaagaccaggttcaattatttgacaatcatccagtcagaagaacttttgcactcctcttacaaaaagaacgtaaggcagtagttgataggggaaggtctaaaactccttgatattaaatgcaaaacatttattaatgttaataatagtaatataataatattaaatgcaaaaaatgtgcattgtgcatttttctggggagaaggttcataattttcattagaatcttgaaggtgtctgtgaatcaaaaagagattaaaaaccatagctttagggactagagttgtcccagaatggtatcccatttcctggggagagacataaaattggaggagtccaacctctcccttctggggctgaattttaaagtgcagttgaatagtcattcaaaatttaagcttttcaataataaaaagacaattcagttcaaaaatggacaaaagattggaatagacatttctccaaagatgtacagatggctattaagcaaatgaaaagatgttcaacatcattagtcatcagagaaatgcaaatcaaaatcaaaataagataccattacacatccactataataaaaaaaaaatggacaatcacaagtgttgaagatgatgtggagaaattggaacactcatatgttgctgatgggaatgtaaaatagtgcagtcactctggaagacagtttggcagttcctcaaaaagagttaccatattacccagcaataccaatcctaaatatatgctcaagaaaaatgaaaatatatccacacaaaaatttgtacacaaatgatcttagcaacattattcacaataacaccaaagtggaagcaacctaaatatccatcattgatgaatgaataaacaaaatgtatatccatgtaatggaatgttatttgggagcaaaaagatttgaatgaagtattatactactgatgccacagcatggatgaaccttgaaaacaggaagaaagcaaaaaaaaaaaaaatcacatattgtatgactccatttacatgaattgcccagaattgacaaatctgtagagatagaaaatagattggtagttgctagggattggcggcggaaggttggggtgggaaatggggtggggataggaggattgggaggtgaagactaaagggtatggggtttctttttgagatgaaaatgttctaaaattgattgtgatggttgcacaactctgaatataacaactaaaaacaactgaattgtgtactttaaatgggtgaattatatagtatgtaaattatatcttaatcactgttaccaaaaaaaaaaaaaaaagcctctgatgcatggcagctccttaaaaatatcaagtttatattaagggaataccacaacacatatagcacaagctattctaaagttttctattttcaactctcagttcacaggagtaacggtacctttcttggagagagtggatgttcaagctctgttaatcattgcttgtggtgtggggtggctctgcactgtgcaatattgtggggcagagggccaggggcctgcacaccgcaggggttcctgctcttccgggtgggagttcagtcttggtgctgcttcctgttaggcgaggttgcaggcagcaaaggccactcatcagccaggcagtgtcttggctaagtgtattctaaggagaagctgcaggaatgcttggcgctaacctcagtgcttagaggaggactgtttacaaacactttagagggttacagaccactgatgtggaatatgagcatattgaagttctgccctaagactgcttagcaagtccctcagtatctctacaagcatgactgggcaaagtaaagaaagaaaagccaagtacattacctaaacctgctttatttctttggctatgagaaacagatgagctaagatactctttgaaactagtcttcctagtccttttctggagtggctatccctttgacaggcatccactgtggatgggctaatcatcagttcccagagctgtcctgatttctgtggcaccagctttgggaggtaatgggggcctctcagtgggccagctcttggatttgtcttgccattgatgtatagcataaacccaaacagcccaccagtccctgacttttctgcgacctaggacatgtgtttcagatccccaacttaaataaaatacaacaaacaagaccggaagtgttatctcccagttagtttcttcagccacaggcaagcatagcccttggtcccaacaggagcatgcactgcaaccctgcaggttcctgtgtaacccaacagggcagtggctggggcaggagctcagtgcttccccaaggatccccttttctggaagacaggcccctcagcccagcatggaaccccagcagtagcctgttcatattaataaattctggaccatgggcaaaggacaggaaaggttccagattggtgatatgttcaacctgctacctcctgcatgagctatggcttgtagactaagaaggcatcacctgatctgtttattttgctccaaaaaggtttaacattaacccattgtttaacaacaccaagcaattccagacgcttccccaggcaaagtcattccttaaatccacatttctcaagctgttttccagagatccaaaatatttgaagtattaagtgttttattagtccattttcatgctgctgataaagacatacctgagactgggtgatttacaagagaaagaggtgtaatagacttacagttccacgtggctgaaacctcacaatcatggcggaaggcaaggaggagcaagtcacatcttacatggagggcagcaggcataaagagatcctgtgcagagaaactcccctttttaaaccatcagatcttgcgagacttattcaccatcacgagaacagcgtgagaaagacctgcccccatgattcaaccaccttccaccagattcctcccacaacacgtgggaattcaggtgaaatttgggtggggccccagccaaaccacatcattccacccctggactctcacatatcttgtgtcctcacatttcaaaaccaatcatgccttcccaacaatctccaaaagtcttaacttatttcagcattaactcaaaagtccatagtccaaagtctcatctgagacaaggcaaatctgagccgatgagcctgtaaaatcgaaagtgagttaattacttctcagatacaatagggatacaggcgttgggtaaatatacccattccaaatgggagaaattggccaaaacaagggggctgcaggccccatgcaagtccgaaatccagcggggcagtcaaatcttaaagctccaaaatgatctcttttgaccccatgtctcacatccaggtcacgctgatgcaaaaggtggcttcccatggtcttgcacagctccactcctgtggctttgcatggtacagcctctctcccagctgctttcatgggctggcattgagagactgtggcttttccaggtgcacggtgcaagctgtcggtggatctaccgttctggggtctggaggacaatggccctcttctcacagttccaccaggcactaccctagtggggactctgtgtgggggctctgaccccacatttccctttcgcactgccctagcagaggttctgcatgaagacccaacctctgcagcaaacttctgcctggatatgcaagcgtttctatacaccctctgaaatctaggtggaggttcccaaacctcaattcttgtcttctacacacttgcaggactaacaccacatggaatctgctaaggtttgggacttgcaccctctgaagctatggcctgagctctacgttggccactttcagccacagctggagtggctgggacacagggcaccaagttcctaggctgcacacagcatggggaccctgggcctggcccatgaaaccattttttcttcctaggcctccaggcctgtgatgggagaggctgctgtgaagacctctgaaatgccctggagatattttccccattgtcttggggattaacattcggctcctcattacttatgcaaatttctgcagctggcttgaatttctcctcagaaagtgggatttgctgttctattgcattgtcaggctgcagattttccaaacttttatgctctgtttctcatttaaaacaatgcttttaacagcacccaagtcacctgttgaatgctttgctgcttagaaatttcttctgccagataccctaaatcatctccctcaagttcaaaattccacaaatctctggagtaggggcaaaatgccaccagtctctgctaaaacatagcaagagccacctttgctccagttcccaacaagttcctcatctccatctgaaaccagatcagcctggatttcattgtccatatagttatcagcattttggtcaaagccattcaacaagtctctaggaagttccaaactttcccacattttcctgtcttcttctgagccctccaagctgttccaacctctgcctgctacccagttccaaagtcgcttccacattttcaggtatcttttcagcaacaccccactctactggtaccaatttactgtattagtctgttttcatgctgctgataaagacatgcctgagactgggcgatttacagaagaggtgtaatggacttacagttccacttggctgggaaagcctcacaatcatggcagaaggcaagaaggagcaagtcacatcttacatggagggcagcaggcaaaaagagagcctgtgcagagaaactccccttgttaaaaacatcagatctcatgagacttattcatcacagacttattctgtgctgtcatgagaacagcacaagaaagacctgcccccatgattcaaccacctcccactgggtccctcccacaacgtgggaatttaagatgagatttgggcagagacacaaccaaatcacatcaagtgttttttaagaatatgccaaaacagaatggaaaacacagcaagtcaaattccccagagccaggtcagcctctgaatgggattaggagtgccctctctccctcccactggcaagcatcttgcctcagcctcctctgttgcttcccaaatggaatgggagctggtggcttaggtacttagaggttctttaccttctgtgtgtcagggatgcctctggcagagttgaggagcctatggacccctcagaataatgactaagtgcataaagtaagatacaaaggccgggtgtggtggctcacgcctgtaatcccagcgctttgggagaccgaggcaggtggatcatgaggtcaggagatcgagaccatcctgactaacatggtgaaaccccgtctttactaaaaatacaaaaaattagctgggcatggtggcgggcacctgtagtcccagctacttgggaggctgaggcaggagaatggcgtggacccaggaggcggagcttgcagtgagctgagatcgtgccactgcactccagcctgggcaacagagcgagactctgtctcaacaacaacaacaacaacagcaacaacaacaaaagatacaaagcattaaatggaaaataaaatatcatcattcagttatgaaaacctaagaaaaaacaaatttgtgatgtagtattatatgcacttctttgttaactcattaaataacaagactgagtggcaggtctatcacctaccatgcttttgaagtggggacatatgaaagtaatgttttaatatgtccatcacaattgtaatgagctatgaaaatatctgtgatttctattggaataaagctaaaggtactgctagcactgtggcctatactcataatggaagaaaagtacatttcagtcagaggttattgaaaataaggatgtcagtttttcccacccaagttcatggaaccctaaattgtatccttggatccttgggaagtgtctgtggactccaggttaagaatttagaggcctacttatgttttatctcatgcctggtcatgttggttccctgcgaacattcacttgtttacaggaggcagtatttgtgcttaatgtcagtcttgactctaagaacttagtctttttttaaaaaataatttcaacttttattttaaattcagggggtgcacgtgcaggtttgttacatgggtgtactgcatgatgctgaggtttgggatatgaatgatcccaatacccaggtagtgagcatagtatccaatagacagtttttcaacccttgctcccctcccttcttcctctttctatccccagtgtctattgttgccatctttatgtccgttactacccaatgtctagctctcacttgtaagagagaacatacagtatttggttttctgttcctgccttatcttgcttaggataatggcctctggctgcatccatgttgctgcaaaggacatgatttcattcttttctatggctatgtagtattccatggtgtatatgtaccacattttctttatctaatccgctattgatgggcacctgggttgattctatgtctttgttattgtgaatggtgtaatgctgaacgtatgagtttatgtgtctttttggtggaatgatttattttcttttatatatatacctagtaatggaattgctgggtcaaatggtagttctgttttaagttcattgagaaatctccaaactgttttccacagtggctgtactaatttatattctcaccaacagtgtataaagcattcccttttctctgcgaccacaccagcatctgttgtttttttgactttttgataatagccattctgactgataggagatggttatctcagtatggttttcttttgcatttctctgataattagtgatgttgagcattttttcatatatttgttgactgcttgtatgtcttcttttgagaagtgtctgttcatctcttttgctcactgtttaatggggttgtttgctttttgcttgttgagttgtttaagttccttatagattctggatattaaatctttgtcagattgtttagtttgaggatatgttctcccattttgtttactctgtagaaagtttcttttgctgtgcagaagttctttagtttaattaggtcccacttgtcaatttttgtttttgttgccgttgcttttggggacttagtcataaattttttgcctaggctgatgtccagaatggtgtttcctaggctttcttctaggtttcttataatctgaaattttacatttaactctttactccatcttgagttaatttttgtatacaatgaaaggtaagggtccagtttcaatcttctgcatatggttagccagctatcccagcaccgtttgttgaataggaagtcctttccccatggtttatttttgttgactttgttgaagatcagatggctgtaggcatgtggctttatttctgagttttctattctattccattggtctatgtgtctgtttttgcacctgtaccatgctgttttggttactgtagccttgtagtatagtttgaagttggatagtgtgatgcctctggctttgttctttttgcttagggttgctttgggtattctggctaagtaagagcttagcctttaaatgggctgagataataaatcaacttacccaagcaaggtaatattaattttttttattcatgacatactttttggaattttggagaactattgttctgcatctgacagatcagagcattctgcctgtgttagagttaggccctgaggttttggaagccctcagcatttaggacagcatttagggcaagcctgggatggtgagtgctcttctcctgggtcttcttggaagaagaccaggtttgaacaagcacactacagtctctgtaggtcacaatcccaatgcttgacatgcagcctcgtgggctggctgcatatgatcagggagaagctggaccactcagccatttcctctgcagagttgcagggtatgctactgtcctctgtggacaaggggcctatagcactattggaggagctggtgctctgtgtgctccaagataattgctcactgccgaagtgcagctccttaggactggggtgagaagagagatggaggagcggcttctgcagggagaccagacagagctcaggtgggcacagctctagacagcagtcccaaatctgtttttacaaagcaatccaacagtttctgagtctttctgaaatctcaagatgcattttggatccttgacctaaacttaaacactacaaacaaggccaaaactattatctagtgatgtgtcagacaattatgtctgtctgctgctggcatgctctgctgcctctcatgccaagctacagggtgcctgctccaacaagaaatataattcttcaaattagcatttctcattattttttaacactggatctaaaaatatttgattagattcaaaatttatccataatattgctaagattttgtttttttggttatagagtcccactctgtcacccaggctggagttcagtggtgcagtcacggcttactgcaacctccacctcctgggctcaactgatccacctcagcctcctgagtagctgggacttcaggcacgtgccaccacacctggctaattttttatatttttttttgtagagatggggttttaccatgttgtccagtctggttttgaacttcgggattcaagcaatccgccagcctcagcgtcccaaagtgctggaattacaagtgtgagctaccaccactggcagttaagaattttaacaatttgtcaatgaaacaagaatctcaattagagtctttatatacaatctgtactgttggaattttcaaataaatattgtaaagaaaattaacactattttgccaaagcttctcatcaatacggactatgaagaatttaaagactgtcactaaaaacatcaggaattttcatgctagaaagcttaagataactccttccttccttccttccttcatccctccgtccctccctccgtcccccttcccctccctccctgtctctctctctcttccctctttccctccctccctccctccctccctccctccctcccttccttccttccttccttccttccttgcttccctctttccccctccctcccttcctccctttcttcctttctttccttttttctttctttctttggagacagggtctcactctatggccctctttctccctccctccctccctccctccctcccttttttcctttctttcctttcttcctttctttccttttttctttcttcctttggagacatgggctcactctgtggccctctttctccctccctccctccctccctttcttcctttctttcctttcttcctttctttccttttttctttctttctttggagacagggtctcactctgtggccctcttcctccctccctccctccctttcttcctttctttccttttctctttctttctttggagacagggtctcactctgtggcccaggttggagtgcattggcataatcacggctcactgcagcttaggcatcctggcctcaggtgatcctcccaccttagcctgctgagtagctgtgattacaggtgtctgccaccacatctggctaattttttaaattttttgtagagatggggtttccctatgttgcccaggctggtctcgaactcctgggcccaagcaatccaccctaggcctcccaaagtgctaggattacaggcttgagccactgtgctgggccataggattttgatcaaatatttttgcaaagattgtattagaagtttcatataaatgcaatatttcttaatacttgcattttattttcatcatcataattacatattgcagagaaatgcaatgacttttacatgtaagcccccttaaattctctccagtttaccccacaggtgtaaatataattgtttatgcttttcacgggaagtcttctcttgaatgttgggcctttggatgaaagagccttggtggtgaagccctggtatggtttctgggacattgcaagccagccctttctcctcttcttttatgcttccactaaaatatttctgcagttaaaatttattttgattaatgcttaaacatacatgggctactcagaatgacagtttatccatttattaattcattcatcatacattaatcaagcaaacccctcatcttagaagactgagttcctgctattccctgaagatgccagcacagaagacacagatgccagctcccttcctgctccaagaacctctgacaagtgcgcatggcagtactagtaacacacctgtgcccttagcaatttgtatcaccaatgcttgaaaccccagtgcccagggcagtgaggcccagtgaaatgagactgagagcggagaggtagggcctcaaagccagcttgccacttagcagctgtatgcccttgggcagtttcttcatatgcagaatgtggactatgatcctaattcatcaaggctgtcacaaggccaggtgagatgctgaaaagggaagacaataaaaatgctgtagatggaactccgtatgtaacttcagccacccaagagggcagctgtaggaaggcatcagggcaggaagttgaccctggcctcggggtctgggagacaatagaggggcacgcgtggggtgacttggagagccagcccatccaaagggaggaactaaaacttggctccctgtgttcacgggcttctcaggaaaagctggctgctcaattttttaatgccattttcctggttttcaaatgttagcaccaattaacttaaaacaaacaaaaaacaacactgcgcaggccaaacagtaaagtttgtaacctctgctcacactagtgttggcgtagtaaagatgtcctgggaccatgatgcattactgcagttaagattcccaggaaagggagtgggggcccagcaggaggagagccatctccccttgtctgcagggctccaaacaagactggagccacagaaactggccacccatcatatgtcccttcaaccagaatggggctgtttttgcaatagagtgccatctataaagaaccaaagccaaaaaacttctaggaaaaaaaaaataggagaaaattgtgaccctgggttaggcaaagcttctttttaaaaaatagtagcatggatgattttttctcttggatttaacaaatgtcaacatttcatcatatatgcttcacacttgtatggaaaaaaagcttaccaaaaacttttttgtggccttttctaatccactttttttttttttttttttttttgagatggagtctggctgtgtcacccaggctggtgcaatcttggctcactgcaagctctacctcccgagttcaagcaattctcatgcctcagcctccccaagtagttgggactacaagtgtgcgccaccatgcctggctaattttttatttttaactttttttttcttactttgagttctggaatacatgtgcagaatgtgcaggtttgttacacaggtatacatgtgccatggtggtttgccgcacctgtcaacccatcatctaggttttaagccccaaatgcattagctgtttgtcctaatgctctccctcatctttccgtccacccccgcgacaggcctcagtgtgtgttgttcccctccctgtgtccctgtgttctcattgttcaactcccacatatgagtgagaacatgcagtgtttggttttctgttcctgtgttagtttgctgaggatgatggcttctggcttcatctgtgtccctgcaaaggacgtgatctcattccttttcatggctgcatagtattccatggtgtatatgtgccacattttctttatccagtctatcattgatgggcatttgggttggttccatgtctttgctattgtaaacagtgctgcaataaacgtgtgtgcatgtgtctttatagtagaatgatttaaattcctttgagcgtatacctagtaatgggattgctaggtcaaatggtatttctggttctagatccttgaggaatcaccatgctatcttccacaatggttgaactaatttacattaccaccaacagtgtaaaagcgttcctatttctccacagcctcgctagcatctattgtttcttgactttttaataatcgtcattctgacttgtgtttttttttttttttttttttttttgagatggagtcttgctctggtcacccaggctggagtgcagtggtgcgatctcacctcactgcaacctctgcctcctgggttcagatgattctcctgcctcagcctcttgagtagctggacctacaggcatgcaccaccatgcctggctaatttttgtatttttgtagagatggagtttcaccatgttgaccaggttggtcttgaattcctgatctcaagtgatctgcccaccttggcctcccaaagtactggggttacaggcgtgagccaccatgcccagccctcactgtgattgatttgcatttctttaatgatcagtgatgctgagctttttttcatgtttgctggctgcataaatgtcttcttttgagaagtgtctgttcatattctttccccactttttgatggggttgtttttttcttgtaaatttgtttaagttccttgtagattctggatattagatctttgttagatgggtagattgcaaaaattttctcacattctgcaggttgcctgttcactctgatgacagtttcttttgctgtggagaagccctttagtttaacacttggctaatttttgtatttttagtagagacatggtttcaccatgttggctaggctggtctcgaacttctgacctcaagtgatccacctgccttggcctcccaaagtgctggattacaggcgtgagccactgcacctggcccccacaccatttctttagcagaaacaactgctatcctggtgatggtgttaacacttgacaaccgtatttttgtatgtatacatattcacaaacaacacatagtgtgatttcatgtattataagaagtatataaggcaacaccatacatgaaatttgcaaccagtaaatgagaaccttaccaggtaacttatatgttgtccttggggtaggtttggtttatgcagagctggtttttgcactttaccgggaataatgtgctttcccaggaattgctgggtttatgtttaacttttaaaaataccaagctgttttccaaagtggctaagctattttatattctcatcagcaacatttgagggtttcaatttaaccacatcctcaccaatgcttgatagctgttagtcttttagattataaccattctagtgggtgtgtactgataacgcattgtggtattaacttgcatttccataatgactaaagtgagcaccttttcatgtgcttattagctattcatatgttttctttggtgaaatgtacattcaaaccttctgcgcagtttttaattgggttgtttattttcatattatgaaagggtaagagttctttatatattcaacacagtaattctactgctaggtacctagaagtaagaatatatatccacatttgtatgttgatataaagacatcattcgaatgtctatagtggcattactcataatagccaaaatgtaaatgtttatcaactggtaaatgaataaaaaatagtatatccatgcaaataatactatatagcaatacaaaggaatgaagtactcatacatgctacaacatggatgaaacactaaaacacactaagggctgggcgtggtggctcattcctgtaatcccagcactttgggaggccaaggtggatcacctgaggtcaggagtttgagactagcctggttaacatggtgaaatcccatctctacaaaaatacaaaaattagctgggcatgatggtgggtgcctgtaatcccagctactggggaggctgaggcgggagaatcgctttaacctgagaggcagaggttgcagtgagctgagattgcgccattgcactccagcctgggcgacagagtgagactccacctcaaaaaaaaaaaaaaaacactaagtaaaagaagccaaaagattatatattgtatgaatccatttatataaagtcaggaaggcaaatctataaagtagtggttgcctggggctgtgggtgggtatgtggaagctttctggggtaactgaaatgttctaaaactggattgtggtgatggctgtacaactctaagaatttacaaaaattattaaaatgtgcacttatacagagtgaattttatgatctaaaatttacatcccaataaagctgtttaaaaacaaacacacagacaaacagaaataataccaaccataactaaattcatgtagaaagtagaagagaattcttttcaactttttcttttaggctggcaaaaccgtgataccaaaagctgacaaagacattattaaaaaagaaatttatggacaaatattcctcatgaacacaaatgcaaaagtcattaacaaaatattagcaaattaagtctattaataaagaacaagcttaatacatcatgacaatatggggtttatctcatatgaattcaaggttgatataacatttgagaaaaaatagagttcaccacatgtgaacgacagccctccaaaaatatctatgccctaataatccctgcaacctgtaattatcttgcatgtcaaagggaaattaaggtgccaaagggaaattgaggtagccaatgtaattaatcagctaaccttaaaatatgcagattatcatgaattacctagttgggtctcatgtaatcacagggacccaagtgtggaagagggaggcagaagagtatcagagtgatgtggtatgagaaggactccactggccattggtggttatgaagatggatgggggccatgagccaaggaatgcaggcagcctctagaagttgtaaaaaatacaaaaactaattctcccatagaccttccaggaaagaacacagccctgttaacaccctgagtatagcccagagaacctcattttgtacttttgaatatacagtaaatttgtgttaagtcactagctctgtcgtagtttgttacagcagcaataagaaatcaatataccacattaacgaaataaaaaattatatgggccagacgcggtggctcacacctgtaatccaagcactttgggaggccaaggcggtggatcacctgaggtaaggagtttgggaccagtctggccaacatggtgaaaccctgtctctactaaaaaatacaaaaattagccgggcatggtggtgggcactgtagtcccagctactcaggaggctgaggcaggagaattgcttaaacccaggaggcggaggttgccagtgagccgagatggcgccattgcactccagcctgggcaacaagagcaaaactctgtctcaaaaagcaaacaaacaaacaagcaaacaaaaattatataatcactttaatgcagaaaaagcatttgacagaactcaatacacattcatgatgaaaacattttttttttttttgagacggagtctcgctctgttgcccaggctggagtgcagtggcgcgatctcggctcactgcaagctccgcctcccgggttcacgccattctcctgcctcagcctcccgagtagctgggactacaggcgcccgctaccacgcccggctaatttgttgtatttttagtagagacggggtttcaccgtgttagccaggatggtctcgatctcctgacctcgtgatccgcccgcctcggcctcccaaagtgctgggattacaggcgtgagccaccgcgcccggccgaaaacatttttttaaaccagaaatagaaatagcagactttaagataaaaagcatgatcaaataaaaaaggagagatttaatgatgataaagtgtccatctgtcagaagatataaaattctaaattatatgccactaataatatagcctcagggaaaaaaactggcagaaatagaaggaaaaggaaattataactacagtggatgggttttttaaaaaattatactttaagttctagggtagatgtgcacaacgtgcagatctgccacataggtatacatgtgccatgttggtttgctgcacccatcaactcatcatttacattaggtatttctcctaatgctatccctcccccagtcccccattcccctacaggccccagtgtgtgatgttccccagcctgtgtccaagtgttccctctgttcaactcccacccaagagtgagaacatgtaatgtttggttctctgtccttgtgatagtttgctgagaatgatggtttccagcttcatccatgtccctgcaaaggacatgaacacatccttttttatggctgcatagtattccatggtgtacatgtcccacattttcttaatccagtctatcattgatggacattgggttggttccaagtctttgttattgtgaatagtgccacaataaacatatgtgtgcatgagtctttatagtagcatgatttataatcctttgggtatatacccaataatgggattgctgggtcaaatggtatttctagttctagacccttgaggaatcaccacactgtcttccacaatgtttgaactaatttacactcccaccaacaatgtaaaggcacttctatttctccacatcctctccagcatctgttgtttcctgactttttaatgattgccattctaactggtgtgagatggtatctcattgtggttttgatttgcatttctctgatgaccagtgatgatgagcatttattcatgtgtcttttggctgcataaatgtcttcttttgagaagtgtctgttcatatcctttgcccactttttgatggggttgtttgtttttttcttgtaaatttgtgtaagttctttgtagattctggatattagccctttgtcagatgagtaggttgcaaaatttttctcccattctataggttgcctgttgactctgatggtagtttcttttgctgtgcagaagctctttagtttaattagatcccatttttctattttggcttttgttgccattgtttttggtgttttagacatgaggcctttgcccatgcctatgtcctgaatggtattgcctaagttttcttctagggtttttatggttttaggtctaacatttaagtctttaatccatcttgaattaatttttgtctaaggtgtaaggaagggatccagtttcagctttctacatatggctagccagttttcccagcaccatttattaaatagggaatcctttccccatttcttgtttttttcaggtttgtcaaagatcagatagttgtagatgtgtggtattatttctgagggctctgttctgttccattggtctatatatctgttttggtaccagtaccatgctgttttggttactgtagccttgtagtatagtttgaagtcaggtagagtgatacctccagctttgttctttttgcttaggattgtcttggctatgagggctcttttttggttccatatgaactttagagtatttttttccaattctgtgaagaaagtcattggtagcttgatggggatggcattgaatctataaattaccttgggcagtatggtcattttcacaatattgattcctcctatccatgagtatggaatgttcttccatttgtttgtgtcctcttttatttcgttgagcagaggtttgtagttctccttgaagaggtccttcacatcccttgtaagttggattcctaggtatcttattctctttgtagcaattgtgaatgggagttcactcatgatttggctctctgtctgttgttggtgtataggaatgcttgtgatttttgcacattgattttgtatcctgagactttgttgaagttgcttatcagcttaaggagtttttgggttgagatgatggggttttctaaatatgcaatcatgtcatctgcaaacagggacaatttgacttcctcttttcctaattgaataccctttatttctttctcttgcctgattgccctggccagaacttccaacaccatattgaataggagtggtgagagagggcatccttgtcttgtgccagtttgcaaagggaatgcctccaatttttgcccattcagtatggtatcggctgtgggtttctcataaatagctcttactattttgagatatgttccatcaatacctaatttattgagagtttttagcatgaactggtgttgaaatttgtccaaggccttttctgcatctattgagataatcatgtggtttttgtcgttggttctgtttatgtgatggattacatttgttgatttgcatatgttgaaccagtcttgaatcccagggatgaagccaacttgatcatggcacataagctttttgatgtgctgctagattcggtttgccagtattttattgaggatttttgcaccagtgtttatcagggatattggtttaaaattccctctttcttattatgtctctgccaggctttggtatcaggatgatgctggcctcataaaatgagttagggaggatcccctctttttctattgattggaatagtttcagaagaaatggtaccagctcctctttgtacctctggttgaattcggctgtgaatccatctggtcctggactttttttggttggtaggctattaatttttgcctcagttccagagcctgttattggtctattcagagattcaacttcttcctggtttagtcttgggagggtgtatgtgtccaggaatttatccatttcttctagattttctagggttttttttttttttttttgcatggaggtgtttatagtattctctcacggtagtttgtatttctgtgggattggtggtgatatcccctttatcatttttaattgcgtctatttgattcctctcttcttctttattagtcttgctagtggtctatcaattttgttgaccttttcaaaaaaccagctcctggattcattgattttttgaagggatttttgtgtccctatctccttcagttttgctctgatcttagttatttcttgccttctgctagcttttgaatgtgtttgctcttgcttctctagttcttttaattgtgatgttagggtgtcaattttagatctttcctgccttctcttgtgggcatttagtgctataaatttccctctacacactgctttgaatgtgtcccagagattctggtatgttgtgtctttgttctcattggtttcaaagaacatctttatttctgccttcattttgtcatttacccactagtcattcaggagcaagttgttcagtttccatgtagttgtttccatgtagttgagtgagttccttaatcctgagttctaatttgattgcattgtagtctgagagatagtttgttgtgatttctgttctcttacatttgctgaggagtgctttacttccaattatgtggtcaattttagaataagtgcgatgtggtgctgagaagaatgtatattctgttgatttggggtggagagttctgtagatgtctattaggtctgcttggtgcagagctgagttcaagtcctggatatccttgttaaccttctatctcgttgatctgtccaatattgacagaaggttgttaaagtctcccattattattgtgtgggagtctaagtctctttgtaggtctctaaggacttgctttatgaatctgggtgctcctgtattgggtgcatatatatttaggatagttaattagctcttcttgttgaattgatccctttaccattatgtaatggccttctttgtctctttagatctttgttgccttaaagtctgtcttatcagagactaggattgcaactcctgcttttttttgctttctatttgcttagtagatcttcctccatccctttattttgagcctatgtgtgtctctgcatgtgagatggatctcctgaatacagcacactgatgggtcttgactatctaattttccagtctgtgacttttaattggggcatttagcccatttacacttaaggttaatattgttatgtgtgaatttgatcttgtcattataatgttagctggtaattttgcccgttaattgatgcagtttctttatagcatcgatggtctttacaatttggcatgtttttgcagtggctggtaccagttgttcctttccatgtttagtgcttccttcaggagctcttgtaaggcaggcctggtggtgacaaaatctctcagcatttgcttgtctgtaaaggattttatttctccttcacttatgaagcttagtttggctggaaatgaaattctgggttggaaattgttttctttaagaatgttgaatattggccccactctcttctggcttgtagggtttttgctgagagatctgctgttagtctgatgggcttccctttgtggtaacccaacttttctctctggctgcctttaacattttttccttcatttcaaccttgatgaatctgacaattattggtcttggggttgctcttctcgaggagtatctctgtggtgttctctgtatttcctgaatttgaatgttggcctgccttgctaggttggggaagttctcctgtataatatcctgaagagtgttttcgaacttggttccattctcctcgtcactttcaggtacaccaatcaaacatagatttggtcttttcacatagtcccatatttcttgtaggctttgtttgtttctttttactcttttttctctaatcttatcttcttgctttatttcattaatttgatcttcaatcactgatatcctttcttccacttgatcgaattggctattgaaggttgtgcatgcatcacgaagttctcgtgccatggttttcagctccatcaggtcatttaatgtcttctctatgctgtttattctagttagccattcgtctaaccttttttcaaggtttttagcttccttgcgatgggttagaacatgcttcgttcgctcagagaagtctgttatgactgaccttctgaagcctacttctgtcaactcgtcaaagtcattctctgtccagtttttttccgttgctggcgaggagctctgatcctttggaggagaagaggtgctctagtttttagaattttcagcttttctgctctggtttctccccatctttgtggttttatctacctttggtctttgatgttggtgacctacatatggggttttggtgtggatgtcctttttgttgatgttgatgttattccttcctgtttattagttttccttctaacagtcaggtctctcagctgcaggtctgttggagtttgctggaggtccactccagacgctgtttgcctgggtatcaccagcggaggctgcagaacagcaaatattgctgcctgatccttcccccggaagcttcatcccagaggggcacctgcctgtatgaggtgtctgtcggcccctactgggaggtgtctctctgttaggctacacaggggtcaggaacccacttgaggaggcagtctgtctgttctcagagctcaaacaccatgctgggagaaccactgctctctttggagctcacctggaaatgcagaaatcacctgtcttctccatcgatcacgctgggagctacagactggagctgttcctatttggccatcttggaatggacccccctataaaaaaaaaaaaaaggaaatggatgtttttaatacatctctctcagtaaacctaagtaaagatgtaagagatttgagaaacaagactaacaaacttgaattaatggacatatgaagaagattccaccccaaaatgtcagaatatgtccctcttcaaatacaagtaaaactaatattggctgagcatggtgatgacgtctgtaattccagcactttgggaggccaatgtgggcgatcatttgaggccaggagttcgagaccagcctgaccaacatggcaaaaccccgtctctactaaaaatacagaaatcagctgggtgtggtggcacgtacctgtaatctcagctactcaggaggctgaggcaggagaatcacttgagggggatagaggttgcagtgagctgagacagtgcggctgcactccaggctgggtgacagaacaagactctatctcaaaaataaataaataaataaatgaaaataaaactaatattaaacatatgttgagacacaaatgctcaacaaattcaaatgaataaaataatataatccttgactgagtagaattaa

SEQ ID NO: 304 - DNA, 10816 bp, Homo sapiens
ctaaaaatggtactgcatgccaaataagaaaatatatacactttatcattaagctacagctaacagaaatctaatcaacgatccttatgatttcctcgtatctaaaaaataaatgcaagcacttgaggaactgtataaatacagggcatctaccctacaatactgctttattaaaataataaattcttttaataagtttaaccagacataaggctcagggaaaactactctgtgcatatcagcgtacggtgctgaaactgtaaaagacgacctgtctctgacatcatactcatctttactctcctgatgtcgtaagggacgtaagaaaaaccacattataagcctaaatgtactgtcttcaagtatctccatgattaaagtgttcctaagaaaccgtccttatttctttctatccctcatttgtgtgcatggagccgttagttcagggttctccaatttcagtccacgatttatgccacatttccgtacctcttgtactaacataaccgtttaaaccaactcactattttaaaagctgccaaccttaacatgccacactaaatgagcgggtccccttgtgccgtgaatgaagtagtcccaacagcgctagctagacagcagccctggcagggaggccgcactggggtctctccgctgaaaaggaaggtgggtccgccggggaaggtgagtactgggcgcagctcgctcgcccacctggccactctccgaagcgcccccagccacctggactccgaggaagggctgaccacctggcggggccgaaccccacgccgggctgcgccacgccagactccgccagtgtgcagggcatagcgggccaggccgagggactgggcttcggggcggacccaagccggcggggacgcgcctggtggttcgcaggccgttgcgcaaaccggccgcaagccatgaggccgcgaagccagaatcaccaaggcagcctgggccgcctccagaccaggacacggcagccccttgcccctccaacttgcgcaccggcggttacagggttgccgcaagcacgcccctgagccttcccgccgttacctcgggccggcgctgcgcacgcgcgccaccgctaagcttacgtccagcctctgtagtcggcgcgtttgttccgcccactgcccccacacttttaataattgaaacaatgccttctccagacttcccctgcacgcgagcaaatgaactcacccacatccgggaatccgaggaaagcgagtgcagacacgtgatgcgggggagggggggggggcgtggcaggagcaagcgtctgccgcggtggccgggtgccggtaagggtttccagcgcccccggcctaggttttggaggcgcgggaatgcgttcgttgctcagtgtcggacttccccctattcccatcggccgaggctgtcactttacgctcataaccgtttttctttactgcactcgtgtcgggaggaaagggacttgcgtggcacccccagacctccccgtctccgcttccacgtttggtacatcctgcctgaggcaggaagccgcagctgagggacggcctgtcgtacggtgcggatggtggtggcctgcgaggctcatttctagcaaggaacaaggctttcccgctttgattttataaatattatgtttacaaagctgtaatatatagaaattgataagacgtgtccctgtccctggaaacgcaggcaccgcgtgtttggaaagacattcatctgggctgtttgacagactccccagttggtgccatgctctgtgcttagggaactgtgagacccctggaggggtgggtaccgggaccgcactcagcctggggtttggaggcggcctcctataggaagcgacctgggacctaagatttttagactgactgtgggttcactggaataaaaaggaagaaacaaagagcattgcaggcatcgggactgtcacgtgagtaagaaaagtttgttcaggaaacagtggtcgtactgggtgacgagtacttgggacggtggctttaatacacaagataatcagtgtgccctgggcattgattatcttgatgcttcccatccttccagccccttatgagggaaggcaccttcgcgcctaatcccggaaatgggatgttgaccttcaagagctgacgcctgcgtttatcttgaaaggaagagtggcattagtgatgtggaaaagggggttttaactgtcaaggctggaaaatgtgacagggttggaggtgtttggagaagggacaggtgaaaaagattgagaccaaatgtggaaagatctactaaggaatcatgggtacaaaatgtacacgtaacagttggaggcaataatacctgagcaattgaccacaaagctgacctagcttgtttagtagattaagttaggacaagaagcaagagttcaaggatagaaggcctactgaagctcgagtgatttgagaaaactttacaaaggtggaaaatctacgtgggcctccgaaagtcaggtttggatcagctgaggaaagtgagaagggtatcccaggagacagagcagcaaggacaaaggagtagcagcaggaaagtggggagcacttgtaagacagggacttcaaaagtataaccaaaacttcgtcttgctttgagttatccactgggtagtactcggttaattattgagtactggattaattaagccctcacctggctcaccggtgacagaagtagcagggcgcattttgcttaacttttgccgagatccttgtcatgggggtgtaaaccctttcccacaccaatctgtgtataatttttgccaaggtgttagggatatcttgcagttatcctatgggggacagctgtgagcctttttggttttttttgtttttttttttccgagacggaatcttgctctgtcgcccaggctggagtgcagtggcgcgtggcgctatctcggctcactgcaagctccgcctcccaggttcacgccattctcctgcctcagcctcccgagtagctgggactacaggcgcctgccaccatgctcggctaattttttgtatttttagtagagacgaggtttcaccctgttagccaggatggtgttgatctcctgacctcgtgatccgcccacctcggtctcccaaagtgctggattacaggcgcgagccaccgcgcccggccctgtgagccatttttacaaaaacttccacctgccttggcccaaacctcagcgttcttaggcacaggagctcatgaacatactgagataacactaaactggactatgcgaagggaccaactacagacctgacacaaatcctcaaggcaagacgatgtctgaagttgagcttgtaaaggaaatggcttccttccttaaaatatcacccaggctgagctctgaaaaaagcacctccagatggtgggttccaccccgctccaccaccccaaaattgcttattgtgtgagtctccatagtctcagaaactgagagtacctttgatgccagtggcttccgggctttttggattgtcacttggtagcagggagcacccataggatgatgcctatgatgagtcagggcccaaccttggaaacagggaaatccagaagtatcctacaagctagccagccttttggattagattatagcagtttcagagaaaaatggggaatcagccatggtcaaggagctaaataagcatcgtgaccatttgggccagaaattgaagggagtgtagcgttaagaattagaggaaggaacctccgaggaaggagctaccccaaagggaagcagaaactggagaaactttagcagtatgaggttctaccactggtgttcacctagaagtgctttattcagatctcagcctgggtactattttagggaaggaagccgtttcctttacagtatgttcgtgtgactcctgtgcctaagaatgctgaggtttgagccaggggctagaaaggaaacttagctggccattatgaatcagggactcatcaaaggcatcacaaacaggaaaaggtgaatgttcaagttagaagagaagagctacattgagatgcaacatattaatatttgagggcctcgtttaacgtgttgctctcctgtcacactctatgacactggtctgtcagctgggctatgcctgtccagtatacactataaaatatgtatcagttggggttggagagaggaactgtgatcaaagtagtcacccggcccatatgagaaaatgaaccttttcccaaaaggtggccccagactaaaaagcctggagaatcctaatagtggattataccatctcttcagtcttcgtgtttaagaaataacctctttggcttacagatttgacaagatcaaagctgcaggaaaatggacagtgaggttcagagagatggaaggatcttggatttgattgatgatgcttggcgagaagacaagctgccttatgaggatgtcgcaataccactggtaggttatgatttgagctgaggatgggttaaaggtattgatctggcagtaactagtggaggagggatatcaatggaagataaactagtgtggcaaagaaatcaaagctgtggaattctctaactctagaagcttctggagagcatccagttgtatgttttatttgaagaaaaatgtggttcagggagctaacatggccaggtcagttaggagtcatgccaggactagagccccgattttctgagccatgttctgtccaccacacgaaaaccagagaaaccaaataatgagagtttaatgcgcaagatggggaagaacaagaagcagcagcatatgagctctgtttcttacttccctgcctgtggctcatcagtctttcagcatttttagaaacttacattcttggagcatacacctatcttaggttccctggaaaatattcagaagatacctgggtattcttttgcgtttaggccagtggccttctggaatactcttttcttccccatctttggaaaactctgctgcagggagtttgttaaacctcatgtaataagtgatccaaaagttttgcttatataaatgtttgtttaaaatcctatttatgtcatagaggcctaaaaaagggaaaacaggactgtttttctttaaagcatgccagctgccctgagaagagtagttagtattgaataaaatataatttatagttagaatatctgctgttgctgtttgcaaagaaataaaatagttcatctgtattttcatttacgaataagagatagtaatatgttcaatgaataatatacatatcaaataagtcatagcttagttcaagcttaggaaaatagtcaaaagagagagcataataagaattatagatgtcatttattgaataccagttttatgccatggactgaggttggaaatatacattatctctaattcttaaacaaccctgtgagggaggtgctgttattcccattttataggaaaagaataggatcagaaagggcaacttgcccaaagtctggtagcaggtaagtagggcttcatataacatatacctaggtctgtgaagttccaaatcctgtcttgtgaacttctgttcattcattcatttgacaagcattttttgaagcctactgtgtgccataagactatgtgaacataagatacagttcctcctcctgaggggtctagaaaggcaacacttatagataagtaattgtgataataaatattctaggtgggggcataaacagccacatcatatacgaagtggctgattgcctggtgggcatcagaaaggcttctgagagaatgtcatgtttaagctgggtcataaggaaggaccagaagtttagtggaggtagacaagggtattgcagcagaggggacagatgtgtaaaggcccagagttttgaaaggctttgggacatggtgagtcattcactgtggatgaagaatacatttgtcacataagtaggctgaaaagttgggcttggatcagattgagagtggtatttgatatcacacttagacctcatcctcaggagatccaggaatgaatggtcttaaaagcaagactgctatgctcagatttggcttttggaaaatcagtttagccagcattgttagagatggtgtgacatggagataggggcaagtgagaccaattggcaagctgttgtggtctaggcaagggaggagggcctaaacaaagtcaagaaaataaaggagacgtccatttctggagaagtttatggctcagattggagaacatttgggtggcaggggtggaaggaggtttccctgctgacttccaggcgaagttggcttggccctgctgctaatccacacctttcgcttgtcttgcgattctaaggcaatgtgtatgccagttaggttttgctgcataacaagtcaccccaaagcttagtgacttaaaagagcaactgtttatttcatgattttgtagctcagctgggagggacttctagtctgcaccagctcagctgatccctgccaggcttgcctgtgttgtgcagtcagccaacagactctggaggctgggtaatctaggactgtctcacatgtctggcagttaacaagctgtctgctgggtgatggggtgactatgccatggtctctggtatccagcaggctagcccagacttctcaatctcagggttccaagagcaacctgagaggaaacggcagagcttcttggagcttaggccaagaactggcccactggcatgacagcttcattctgttggccaaaacaactcacagggccagtccaaatccaagattggggaaatcagtttcaccttttgataagagtagctgcaaagaactaagggcattttacagtacaccataatgggtggctgggtttatgatacttttgtttttgttttccaggcatatatgccattttatgtgttggcatgtattgcaagggacagtagataccaaatgaaagacacattattttagaaagcataccacagataggatgaaattaagcaacgttgtctgcttctgaattaaagaattcattaaccaaggacctatttattctttgtcatctataagtaattattaggactgaactttctttttaagtttaagataatatattattgcgttacaataaatgatagctcttctcaatctgttcaagtatgtttgaatctgtcttgtagaacaagatgtatgtgattcaaatatagataagtaaatatcatttaatatatattgagcataattttagaggggaaaacatattcacatactacaaattagaatccagtggaaaattttaagtctggatatcgcataacagtttgctaaccataaaacaaaacacagataattgaaaagaaatatattggtatctgtgaactctggtacaaagcagagtttcagtagtaatacatttaaacttaaaatacaagtaaatgatcccagatcctacagtaagtgtggcccatgacttaccattttaagaaaattgctggtagggtgtgaattggtcatttgttgtgttttttgttgctctgctccaccactagagggaggtcttatctattaattacattttcagtgtttcctgccctacctccatttttattataatatagacatgttgggccaggcgcggtggctcgcgcctgtaatcccagcactttgggaggctgaggcgggtggatcacctgaggttgggagttcgagaccagcctgaccaacatagagaaaccccatctctactaaaaaaaaataaaaaaatacaaaattagccgggcatggtggtgcatgcctgtaatcccagctactcgggaggctgaggcgggagaatcgcttgaacccgggaggcagaggttgtggtgagccgagatcacgccattgctctctaacctgggcaacaaaagcaaaactccatctcaaaaaaaaaagacatgttgggtccaagataattttttggatacatttcttgtgtctaaggaatatgccagcaaactagtattcttttaaagcacgctcccgctaaagaagatttaggattcactcatctcagtgttcctagccgctaataataatagcaaatattccttgagcactggataccccacagagtgctcagcacttgatctgaattacctcacctaatccttacagtagtcctgtgaggtgatggctcttttgttctcccatttgccaaggaagaaacaaaggccccaagggtttgcataccttgcccaagtaacccagcaaatgggagagttgtggtcttggatcctagttggcttccaaaagcctctgcccttaacctttctgccacagtgcctccttcacaaatgtcagagtcaaaatgcccatcattccctactgaagaaggcccgggccatgtttgaatgatacttctgatagtttcctcacgtgtatgattttagcttttttagaatacacatatcaattatgttgcctgttcctaggaactcacaagctttaattctaagtgttcttgagttccaagaagatgcagaatatattactgttctgaatttctattgtaccttttcagaatgagcttcctgaacctgaacaagacaatggtggcaccacagaatctgtcaaagaacaagaaatgaagtggacagacttagccttacagtacctccatgagaatgttccccccattggaaactgacgcttggctcctttcttgtggatggattttctcaaagtacacagataaagcatggtttgtttcagtctccaaattcaaacctttgagtaataaatcagcactcaaaaatgtacacccatttagtttgtggtagcaaagtgcaatgcgaaattgaatgagaaactgagatttctcagtaatggtgaatatttcgctctttaaacctaaaactcttcattgagtagcttatatttgaacatgattggttaaacatttgcctctacctctgattttgctttgctgtcaaagtttaacaccttccaactacttatgtgtgtcctgtaacacaggtgattgaacgtatgagagggaaaggcaaagaaaaaggaagccagacactaggagaattattaacttctcatacttccccacattgagaagcattcggagtgtatttagcctgtagatgttgtgatatgcaaatatcccattccctggttactggcattcctaagattcttcatggtattttcaaactttggataaatttacagattagaaagatatctgacagttaatctctgttctccttacaaattccttttgtgctgctggaaaggatctttggctaggtggatgactagttttattcaaagccttttctcaaagccctttcagttacaaccaccccactatggaatcagtatttagttatacatttgtataagaacctgtattttgaaaaacacattcatgtatatttattcctggaattatttgcctgttaaacagtgtctttcatgttctctccccagattgtaaactctgtaagaagctgcttgtatctgtatcccttgttgaaactctgaaaacactgaataactaaaatctcttctcatcctttttatgctgggtctttttgtttacttagcttttaggaggaagaggtacatgaaaaaacaaattagcttattttaggttttcaatcacaaacatgattttagcagctatcctataatccagatacatccaggctgatttcttctctttgcatcagtagttctgcctagaaatcttttatcttcagaataaagaccccaaggcaccagtcccttcagtaagcaaagaaagacaacctaatagaaaagagacttacaatattaaaaaaacttatacaagagaaaaagcttttcaaaaaattaaaatacctagaacgccacagttctttcacattcttgttaaatgaggattttacagcttacttgtggtatgtaatctctgagacactaacatctaagaacttgacaaatgttcatgtgaatcctgcctagcctttccctggaatattagtagaccagtaaaatatgaaagctattcttgatttctgctgaaccagaatatgatatctgtaagacagctgttggtttgtgtctatgacactcatccgagaactgccgccacccccaggaatagcctctgggcaagttcgtaacttgtgttatggtgccagaactgtagctcattgtatcaggaattaggtgacctaatttgggctagtcagattttgtcaaccagggcttcgaaatctccgtctaggactggcttgaggatgatgggcacaagaaatgctaagttgctgttacagggtagctttcttcaattgtctgtaccaaaacacccaaaaaggaaagtatctggagagggaggccaagaggctatgtggcctattggttcctgacagctttccagtttagagcctgcatattgcttttctctgtgggaggcaccatgcctggcactgggagtatagcaatgaacaaagtaagtgtggcctctcccttcatggagcctttagttggggagacaggcattaaaccattagccatacaaatacatgatttcaatttggggcgtatgctaggaaggaaaaataaaagatgtgacttaggttgggttcccagaagccaagcctgaggcagagatttcttgtgcaagtgatttattgaggtgctttcagaagagtcctgtaaggtaaacaggatagggcagggaaagaagctgagccaagatgtggtttgagctgaagtctagcttcagtctgatccagtgggatttctggcccatgacgatgccaagagttttctcaccttgaggca

SEQ ID NO: 305 - DNA, 26175 bp, Homo sapiens
ctcaggggcctcttcacattccctgctgcctcttgccaagagcagaggatctttccaggcagcaatggcacatccaccaaatcagtattcactcagtataaggtagctttgcagaaaaggcaggtgtctggggttacattgatatttcaaaatggtcttcctttattcaccggccagaatgtgcccattcttagatccccaccccattctttcccagtctgatggctacccacacaaaaatatactcaagtgtgcgctcctgcagtagttcatctatgtattcaccaatatccagacacgtcttccatgcaggactggaaattgtgaaggcgctgggcagttacacaccctagaaaaaggggaggaagtgggagcattgttcagagctccctgcccattgtgtaacctcaccattcacaggaatcctcttagccctgggctggcaggggcaccagaaagaagcaaagggccacagaggaaggccaggggctcaaggaatgtgtgcagtttggagaggcagggcttcttcttcttctttttttttttttaaacagagtctcacctgtcacctaggctggagtgcaatggagctatctgaagtcactgcaacctctgccttctggattcaagctattctcctgcctcagcttcctgagctaggattgcaggcgtccaccaccatgcctggctaatttttgtatttttagtagaaacagggttttgccatgtcggccagtctgctctcgaactcctgacttcaggtgaaccacctgccttggcctcccaaagtgctgggattacaggcgtgagccaccgcacctggctgcttcttcatttttttaggacaacatcctcttacctaaaccactgtggggctaatttcataaatctccaactctggaggatttaacccccaaagacacagaccccatgaggccctttgtgcataacggagattccagacctgaagcatgagagtgaaagggagagggggcagcagtggaaggaggagacttgggggagaaaacctagaggcagtgatgaaggcaggggaggagaaaggggtgaaggggggacaggggtttgcagaaggacaaagagaagaaagtcccccacttgggtcttcttctgttcttggaactggagcactggaacttccatcctaatgttcagattcttcctatgaatttgcttcatgctccagattccggtaggtttcctgtttccataacctgtcagagggagtgttcaggggaagctggaaaagtgaatttcacaactaacagtcatcctttgatcttgccacctgcaccctggagctctcctccactaagcaaccatttgggaagtaaggggaacatttccttcccggctccatgggaggaggctgctagggtcccaccaagaactcactttcatgttctggttgggtgcagtgggatgcagctgcagggccagactgaggccataaaacaggcacagacccagaccggggctaaggagaggcgatggtgtgggtgcctggatcccttgctaagccctgtacacacctatgatgcagccacaccccaaggagctacacttcctagagcaaaggcctccagcctggcttactctgagaattaggtcacctccgcatctttcctggataggattcctgacccagccagccacattgtcatctgggaagaatcataacctgtaggaggaagagaggaggtaaaggagaatgggacaaagtagattgagacaaaggtggaagaagaaagcattggctcactaagagagcctctctcccctctgctgtaggtgaagattcatatgcaagcaggctggccggcccagtgtcccctgtgcacatctgcctctggcacatctgaacagtggtcaccttctccaccaactatcctgcagagctggggtggccgccagcttaggtaggctccaccgcaggccatgcctgacagatcttgccttctgttctttctgcagagagaaagggaaaggaaaaataaaagtacatgcacatttctcatttaggttttgggatccctctcccgcttctgtccctttggggacagaaattagcaatcatgggggcctgtgtggctctgcagcaggcttgtccactccaagatgtacctccttcaccctagctgccttgaactgacgcctttctgcaaccatctcaagaatatttgtcaaacattttgtcaggtatcctcccaaatgcctgaaagacaggactgtaccatgtggtctttcccctggttttacaacccgagtgcacatgtccacaaccactcccctgcctccaccaattatgctgtccataaggtaaggccactcagagacctctttcctttcacttctaaaattcctacctacagtggtatactgatcacagcttctcttcgtaaggggatccttggaaagacaaatatcccgtagcttggcacaaatgatccatttgctcaatcatctcagatccaatcactgtttgaaacacagtatttgacttccaagtaaaacacacacgtgcgcacacacacacacactttttgtgagttttattaaaaattaacaatgtccctggcaattaagcttgcagaatttccttgtccttgtttccctccagtgaatttgggacttgcaaactccatgctgatgggaggacccagccaggggtagaaatcagccctgactctctgggtggacaggggcctgactgcccccacctcaccccaactgacttgtagagagggcttgtgtgatggggaacggggacagcatgtgtcagagcgagctttctgaagaaggggtttccatctagcagtggaagtgtcctgggggcagaggagaggattccatgcaggagccacagaagtgggtacaggggaaagcccctggctggcaggggtgtagggggaggtaaagaagagactaaagcaaggacagggtaagtggagagaggagggctcccagtgtctgccctgtccatctagggagcctggattctgatagccagggaggggttttgagaatgagaaaccaagcagcccagtggttgattacctggttctcactgtgtgtgactctgggcacgctgcttaagctctctgagccctggtgtcctcatttacaacacagggatgataacagaactccgttggagggtgcttggcagggctgaatcggatgactgggcgaaaagccagcggtggcacaccttgcactctgcgtaaaggggcgcctattatcaccttggggaagaactggacagagcgcctggcggcgggtgattcagttgggtaggtgggtcaaattgaccggattttccaacccagattcacacttcctgtcgagacggtcgtaaaatagctggcgaaggtgtttgtaaacaaaagtgcattcaaaggttgccgctgggggtgaaaacagcgggggttaggggaaagaggctctgtggctggaagcattcacttagcccggggcactgtcccagcccagaggatatggatgtctttgcagtccctcctccctttcccacctcccccggtacacacacacgcacacacacacacacacacacacacagccggagtcccctcccgcagcaaccccaggacacgcgtggtacagcccttgctgtcgtcccgtcgatgggtttagggatgaagggtgagagcgggtcggcgactgggagtggaggcgataatgggcagagttggattaaattgtctccagcagctccgaaggcaaagcatggggcaggggcggacacaccgcggcctggagggcgctgggcgcggaggaacggagctcgggggccgggccggcgctcggccagcagcgccgcctccccggaggaaggcgggggccgggaggagggagcgggagaaggcggagggcggaggagggcggtgcgctgagaggttatttgtggttcgctttgatcccgagggggaacctgaaactctcacattcctggcatagcagccgcctccggcgcgggccgaccctggggctgcgcgctggggcgcgaacagccagagcgtcggcgccacggccgagaacacatcttcgccgccgagctgagctgggccgagccggaggttgtggtgtctgactgcgctgggcaccctcgggccgcagcggtaaggaaggccgctcggcgctcgggagagcgcgcgaggccacagaaacgtgccccagccaaagctggagtctcggcgcaacccggccttttccgggagtcggagcctcgaggatcgagcgtcctcggggcgcagtgcgccctttcgaggcagccgcagtgcctggcaagggccgctctgcccagggagcgcagcgcgctgggctttgcggggctctagaaacgcgcgggtctcttggggctgggggagaggggagagggccgactccggagacaacagccacagtgtttcgggttgcaggtcggcgggggtgggggtggcgggggacagggatggaggcgccgcttggagctcaagttgcagggtcctgcgggctgatttggttaggtgggggttacaggtgcctttgcccccaactagtccaagaattcctctttgtcttccttggaaaatcctctctggagccacgaattggccctcacttagaaagaatgcagcctgctgtccagcccggtgacgtcagcgttagagtatttggaaaacaaagagggctcgagagggagggaggcggacccgcgatgcttaaagacctctccgggcctcgggctaccctcaccggctcgccccaggcgtaccagcggccaccggtgctccaggtccgcccgggctcgtggtggggcgggagccctggctggggtgccagaacctcctagcttggagactgtctttggttccttaggcgagcaggagcccaggccaaggctggagacgcgcgctggcttagaaaggcggccttcagagagcgcagcgggcgagtgcagcagaggttcgcggccgggggcgcggaagcaggtttttgtaaaggcccaggcgtttgatgtctgaaaggacgtgaatctgaggggcttggccgggacaaattcgcgatgagaggccttggagatgttccttgctcccagtccgggcacactatggagcgcctggaatctgtcaggaaggctccgcattccttcctgccgctcccctgccttctctgtgggagtcggcccagagagtgattatcataggaaatgcccgcagataaaactccagggcgaactgaatcccatacgaattgaatcccatttgcttgctttgcctcgggtagctctggagtcttgcacatctacccctcgttgtgtgtggggggcgcatgactgggtgccaggaaggatgggtacagaggtgccctccagactcatcccccactccccagctctgggcagctggagtactggggtggggagagggaaaagatcgggaatggctgctctgccaacatgccatagcccaaactgaagcaggacactagggctagtttagtggcagaggaggggccacattcctcccacccacccccccaacccctgcccatacacacaggacctgtggcagtgtggattctgtttagttttccctggatcccagtttggagatttgtgttggaagaggctgtggaaaggaagctgggtgagagaggcaggcagatttccagtccatgaaccactgggagcccaggcttagaagggaactcctttctccgatataatctcccagcactttaggctcacagtcccctctcccctgccccaggtctctcaaccaacagcctccccttacttctccagttggcccaagtcaagatgggcttccttgacactgatgtcaagaaagatgctgagtgcccatcccttatgtgcctagaggaccagtgggggcttttccaagtagcgtgtgtgtgtgtttgtgtgtgtgtgtgtgtgtgtgtgtgttggggaggataatcataaaatcaaagacatcatgccatccttcctttttcctggagctctcttgcagttactgtcagcacaaaagactgacccactaaccttaatgggtggcacctttttgcctcatcttacaaaaccattgtcctcttgaagcatttttattcatcctttattcaccaattcaggtgcaattactccttcttcctgttcaccttgcagaatgactgccaaggtcatcccatgacagggagccccagattcattctgtcagcagcgcttgatgaagcagagcccaagcccatcctccaggagttctctggttcagggagagtgggaaaagtggccaggggttcagcgggctagagggtggtaggttgactgtgccaaggctctgggatgcctcagtctagagggtggtaggttgactgtaccaaggctggactctggcatgcctcagtctagagggtcctagaggcctttcgcctagggcttctactggactgcatgcattctttatcacctgccaataaattggggccccatccacccctagactgaatagctaagtggttagatctgaactaggcctgccttagaattgcccatcaggctgtttgatgtgtagctggctgtacgggtggtggttcctggtgggttatcttctggtttcctgttgtctctctccaggaatagtaagtctccatgaatgttatcattagtaatcgtttaccaggattttcactgtgccaggagctcgcaggccactgcctctttttttttcctcatctccatgagtcaagcagaattctttgcatttttctggtggagaaactgaggctcagagattaggtaacttgtcttaatcagtagatggcagcactggtacttgaacccaggcttgtgtgaaccgccccacccctgctcttcacttttatgctttccaccagagtaataatggaaatcctggaaagccttctcctttcccatgggttcccactgattgcttttctctctctctctccccaccccactccaggtgctctggggccaggtgccaccggccattgtccaggcagctgtgtgcaagccaaagaagcatgaggacactggaagactcctcggggacagtcctgcaccgcctcatccaggagcagctgcgctacggcaacctgactgagacgcgcacgctgctagccatccagcagcaggccctgaggggtggggctggaactgggggtacagggagcccccaggcctccctggagatcctggccccagaggacagtcaggtgctgcagcaggccaccaggcaggagccccagggccaggagcaccagggcggtgagaaccacctggcagagaacaccctctaccggctatgcccacagcccagcaagggagaggagctgcccacctatgaggaggccaaagcccactcgcagtactatgcggcccagcaggcagggacccggccacatgcgggggaccgagatccccgtggggccccgggaggcagtcggaggcaggacgaggccctgcgggagctgaggcatgggcacgtgcgctcgttgagtgaacggctccttcagttgtccctggagaggaacggcgcccgggcccccagccacatgagctcctcccacagcttcccacagctggcccgcaaccagcagggccccccactgaggggcccccctgctgagggcccagagtcccgaggacccccacctcagtaccctcatgttgtactagctcatgagaccaccactgctgtcactgacccacggtaccgtgcccgcggcagcccgcacttccagcatgctgaagtcaggtaactctccccaccttgggctttccaactcctggctttcttccagcacaggtctctcagggaggagagcctcaagatcacagcttgtgtcagagctagcaagatccaccccacctccaacctgagaagggagagctaatgcctggcagagaagagggacttagctgaggtcccctaagaagttagtggtgtcccttgccttaattcagagataggcaccattgtctgcttagctgtagcattcaagtaactagagtccccagagtacacaaattgcagcagggggttaaaggttagatttcagaaagaacttcctaaaggcaaggttgggaatgattgccaaactgtttccaagttaagcaggaagaaggtgggacttccttctctggagattttttaagaaaatatgagcagcttgctttctgtgattattgggaggcattcctaactagaggctggaaaggcccagtggtctgattagagacctctcagcatcttacaccagggcaggagcttacttgtctctcctcttcatttcctgccatatgctccctgcgtctgcagcctgcagtgggaaaggattctgggtccaagtgggcccttttctggtgaggctcaggagaggctgctgggccatggtagggacttagagtttgattctgagtgtgctgggaggccctcaggggatgtgatttggtttaccttttctaaatgctctctctggctacatgcagagcatggtttgtaaggggccagaatggaagcaggaagacccggggaggcaagaagtctagagagtttggagaaataagtgttcctagaaacaaggccctgcctcacgcttctcatcttgcccagcatcttttccagagaagcagacacagccatcactgctgcatctccccctatgggagtccaagaaaccccaccaagggaccccaaggatttcagactcttcctctggtggcccaaggtcaaagtctggttctcttcatgcctgctgtgttcctttagtaaacacccactttcccaccgtccggctttccttgctctcgagaaatgagtgacatgatggggttggtatggcggaaccagaggttggagcctcatagtttttctccagcctccacccctccagactcgcactttatcgcccctctcagggctcggtcaggaagagtttcggaagctgagtggtggtttcttcttttggaccagccttattgaaccctgtcaggaaaagatagtaatcacggcaaggaagtagactgtttgcaggagaacaaaaagcaggggagggagaggacgaggagaaaggaaagcaagtgtgaagggaaaggagttgctattctttctcagagctaagtcatccccaaagaatgccagttgtgtctgcctggcccagtgcaggggggagcaagttcttgaagcaaccttgagaatggccattttagcagtggaatggagagtttgagcactccagtggggaccctcttcccagctcttactggaagccccaccttaggtagtaggagaaatacatctgcccaatatctcctttcagatgatccagtgaagattatttgttaggaaacgggctagactcctagcctagggtcctgagaagagcaggggggccataggctgcatggcagcaagagtcaggggcaggctgggtgtgcattagtgctgagatgatgcacccagaaggggaattcggtttttgcggggcttctgggacttggaagattctttgtgaaactgaggcagttgtgacactgggaatcacaaggtcccaggaaggcccttggactccccgtgcctcttgccctttgctccttccctcaacatggagccctgggggtgatgttacaccagtgccagaggccaatagaatattgtcccctgaactcagtgaccacagtagtccagaggcagcccttactcccaaggaaaccaagagtttgggccacatttgttctctaaactgagggtaaactgaggctcctactagaagagatggaggatgggccaccattataggagcacctgccacccgcccagcactggcccagcactctgccaggccttacatagcgtcatcctcaacaaatcccagcgaggctggagaccctcatgatgcaacagagcaatgcccagtctgtggggctgaggcactcgcccaaggttaaacagctggagcagggatttgaacccctatttgtcagactctagagctcagactcttaccctgacatttgtctcattgctctaaccttaactggagtcttctaaaaatgactctgggtgagtggggggtggggggtggcaggacttgaaataggaaggagaaaatgagtgctgctttggcagtcttgaaactggcgactcgtgtaatagacacaaggttgctgctggggcccagccaccaaagttgtcctggggcctggaaggttatatgctcagtcatgattgacatggcctccagccccaaaaataaccttccattgattagaagtgtcagggtgcattttttaagatgatgtatttaagcattagttgcttaggaggcccaggattgctcaggctgatccccaaggccccagccactgtgaggcgggtatgaaacaagcatcctgacattaatcccctctagccctgctgtctgactcttgagagcctcaggcagaaacatttggaaaaggccttccctactggtccctgcctaacactagagggttgaataattatctgcagtaattttaataatatattaattattgataataattaaccatcttcccagtatgcctaggagtggggtgaccccgggctgctctggtgggagccatgagggtctgtgctgtctctgagcaccgtctcttctgttccccaggatcctgcaggcccaggtgcctcctgtgttcctccaacagcagcagcagtaccagtacctgcagcaatctcaggagcacccccctcccccacatccagctgctctcggccatggccccctgagctccctcagtccacctgctgtggaggggccagtgagtgcccaggcctcctcagccacctcgggcagtgcccacctggcccagatggaggccgtgctgagggagaatgccaggctgcagagagacaatgagcggctgcagagggagctggagagctctgcggagaaggctggccgcattgagaaggtaggccctgctggggcttcagaagggcagaccagaaagagaccccgaggggctacctggggagtgggtagtccaaggagaggcagaggagcctgaaaactgtttggctggatttctccctatccctctgtcttccacctccctcactcctcatgcaccctcctgagctgactccagacagctggggaacagccgagaggccggcagagcaggcctggagcatgaacagttgctggccagtggtgattagaaagagcccattcaccagctccttgcacactcgcacccttgccctgcacacaccccctcccatggacacctcccacagagagccctttgtgtcccccacacaacagcaagtctgttccaggccagccctggccaaaaagaaaacttctcctcttggaaaaaaaatgggcgacttgttggaatcacaggccagctaagagcacgtgcggaacctgccagcagccaagtgggaggagcagccggggcccagctggccctctgggtggatggtgatgcctgggacaccaggcagaggcagctctgcctggtgcccgcttctttagtgaagggttaccagttttccgctgaggctcagttttagcagatggcctcaggcctcccttgactgtcctgtggtgtccaagttaggtcaaaccaccccatcatggctggagtctttcggtgcccacttctggccaactgtactcagtttcttggtggaagccagccaagagtagaatgtttccttctggacactgggcacagggaagctgtgtttagtcaccccgcaggcagctacttccaaagtacctggccctgggttcactcagcatctggtccttggggcagccgatgggaccgttgcttgctggtcccagcagtctattctacttccggaggctacaagcttctgaccatcccaccatagtcacctggaggttttgctcctgtttggtggcctctcatctgtcaccttttctgatggagagtagtgggtcagcctcgaatcactccctgggagctctcgccttcattcagctctgctgtctgactcttgcagctggaaagcgaaatccagcggctctctgaggcccatgagagcctgaccagagcctcctccaagcgtgaggccctggagaagaccatgcggaacaagatggacagtgaaatgaggaggctgcaagacttcaaccgggatcttagaggtgagagccagtcacacaggtggaggttggagaacctctgcagaggacttacttcttttgttctagagaaaaattgggaatctctattctctgtcaaaagtgcagatgaactcagagagccaggctgagacccctttggagctgccctgatagagagatgcttgtctctatgtactgggcctaggatcccctcagggatgatggctcttgacagaggaggctcccacccatggggccctgagctgagctggggtttccttatgaacccatccccaatatggaggatacagccccatcctgataggacgtcaggaaaaatcccaagctggcagcttcacctgacactaaaacatctttccttcccttgaaacagagagattggaatctgcaaatcgccgcctggcaagcaagacacaggaggcccaggccggcagtcaggacatggtggccaagctgcttgctcagagtgagtaggggccccactaagaagcctggcctgtgtgcaggcaatgggactgctgcacaccctctggactaggaagattggccttcccccttgcaaagtagtactttgggagcaggtttactgcccactgtatgcccaacactagactggatctggggatagtggggataagtggcttccaaagaagaataggatctagttctgtatcttttaagaagatcagctgacacaagagggaaagccagggagcagtgatttgctgagcttcggtgctgaccaccagtgcagtgcattgggcagtgcgggaggcaaggtagccctgaagacagatgaggtgaaggagaaggacaggtctgagagcttcccagggagttcctggcaacagaaaggtcgggagtgtgcaatgggaatgtgagaggtaggggggcatggtggagctgagccatagcaagccaagtggaggcatctgaggcagccaaaaatgggatcctagaccttaaccaacagatgcattctaaacggggcggtctaagcatccttgaagaatgggcaagttcattgactagtccatttattcattcattagcagatgtgttttaagcaactggcagatgttcaagagagaatgggagcaggcccaggaaggtaccatggcagggaggtcaggaaggaagtggtgagcttaagaaaggagcaggttcccacagatgcaaaagaacaacgggggtggccctagaaaccggtgattaggagccccggtggcctgagagaggggctctgtggggatggcaggggtggagagccagccagaggtgaaggagctattgggcagttcaagaggtacatggggtgggtggcaaagggagccctgagctcagcagcaggaggctctagcaatcagaagagactaagaacagttatttattgagctcctactaggagctttagtgctgttcaaggtgtttgcagagaagtggaatgggagtggttggtagctgggtaaacatggctttgagtcttcacaggaaccctactgtgaatggcacaaagggtagtgtggggtgcagaaatggaggagcagcttgaggacttagctctggctggcagcacccctatcttccttcaaagagggttcaaagactagggcagggaatgggggaacacagcactgaaggaattgacagggtggggcaggaggtaggctggtctcttctggctgggtggggtgagatggcagcggcttaaggtctctgggaaggagtcaaagggaaggagggagaaaggggagggggcagccctggggtttccctgaggagtctggggaggagaagctgcaagggcacggcagattagggtgcctgtggaggaaggcggacttctggagcctgactctgccaaagaaaggaagccatggggcgggtttctgggagcttgctagtgggtgagaagaggggggccggccgggaggcgtttccgctccccggggagcgagtgagcgccgagctgttcttggctcctcgctggagccattaatcttgcagccgcgggtgacctggatgcctggcattccagagccgcgagctgttccgctcccggcccgccccccgccgctccctcccgtgcgcgctgcctggcgcccttcgcccggctttgggaggagggagggtgagcacaaagggagcctggaacgtggaggtgggggctcgctcgctgcccaaggcgcatcccgggtcccgtcggcgcctcgcctgccttcctgccctcctccgctggccttcgggcgtcctcttcccacccgcacccagaccacttatttcttactaaggagctctccttcccgagatcccgcaggcccaaggttttatcagggtcctgttggtaggggatggccagagctcaaagcctcccagcccccaccagggccttagaggttggacaaggctgcaggaagcttctggaagcagagggctgggtcctccggccccttcctcccccagggctgaggaaacccaagcagctcttccttgctccctagtagctattgcaaagggaggtgtctgattgacctcccttttatctggggtcagtcaacactaggaaagtgtggccattatcaccaatgccatctgcttttcctcctaggcaagccacgcagccccccagcactgcccttctggcccttctaggccagcagtgccccctggggatctggccttgaggcctgaggctggcctgttagctccacccccttgggaatatttcttctctccctgcgccccagattctccagctataagatgagacagagtccttccccacagagtcatgctaaggctgaaatgagatgcaggccctgggcaaactgaacgcacaggtggactaggggagggtcctccctgcctgagtcccaacctggctgcccctcctcaatggatgttaacaccccactcaatggatgttaagccagcgaagtatgaacacatccgtttcaatattattggacttcctcgtattttcctccatgccacagaatgataccatcctgggctcagccttcaaacatccaaaatgaatcaagagctaacctgagttgcctctgtgtcctccctgccctgccccagggacctgagtaaatgaatcctcccttccacatgccaaggtctcaagccttcacccttctgttccagaacttgcactgtcctatatgataggtacttagctgcatgtggcccaaagattgaaattaatgaaaataaattaaatttaaaattcagttctcccatcttactagccacatttccagtcctcagtggcacgtgtgtctagtagccactgcattggagggtgccgtatagaacaattccactctggcagaaaattccactgaatcagaatgctgttctagagacagtgcctttaggttcattagcgggagcccatagccctgccccccacctgctctccagcaaggtaggcagctgacctgctcctcagggggcagcctgggactctcaaggggcaggtgcctgggaggtggatttaaggctagaacatcagatggagggctctgtggtctggcttgggcttctcctggccctatggagagggcctctgagcagtttctttgggcaattaacaaaatgatttaaaagtcaggatagcttgacccttacacactaatctttgggccatagtcattttcactgtactgcagactttgcatttccttctgagcctggttgcttacatctcagtgttcttttcagaccatggaaggaaatgtagccctcaacggacctctcggcctgggtctgcagaaggagccccagagctctgggtggcctataagtacaaacgcctcaccatgtagccagaggcagcctgggcctttgtagtgtggccaactggggtttccatttggcagcaccattcacctcctatgtttctcccctataagttggggatcccaaatcctccctggaggggctggaggattcgtggaataagatgtgtaagggcctggtgtgccgacagccgatggtggttctgttcccccttctttcattctcccactggaaggaggaccatgtcacagcctacctgagtctctattttctcatctgtacatgggcatcacagttcctacctcaacagtctcgagccgtcacaaggttcaagggatattgtggatgtgttttagacatggtgcccctggcacaagtggatggtgtttggggctgtcccatggcagtatgtcccagtagaaaggcagggtagcccagttgttactgcaagggtcctggaattgggctctgtcatttactcctgacttaacatgagccttggtttcttcttccatgaaacagggttaatagtggtaccttattcctgttatttttgagagaatgagaagcaactgtgctcatccagtggtcagcactgagcccaggaggcaatggggccagccaacgtggtcactgtcactgatcaagcctctttctccctacaggctacgaacagcagcaggagcaagagaagctggagcgagagatggcactgctgcgcggcgccatcgaggaccagcggcggcgtgccgagctgctggagcaggctctgggcaatgcgcagggccgggcagctcgagccgaagaggagctgcgcaagaagcaggcctatgtggagaaagtggagcggctgcagcaggcgctcgggcagctgcaggcagcctgtgagaagcgggagcagctggagctgcgtctgcggactcgcctggagcaggaactcaaggccctgcgtgcacagcaggtgagctgagaaagtctccaggctagggcagcatctgaggatgttggcttcccttcctcctcggggactgtaggtttggaggccagggctgaggccccgggagcccctgcttagatctaggctgcaggcccgttggaaggcggcgaggatgattgctctctgctccacctttgctgcgtgctcccttccactcgttgtcttagtagaggccctgccacctggcccatgtccagcctcgggggactcctgtcctcggcagcagcagggctagttgtccttgacctctagagaaagtaagtcaggaacctggatatagaaggcctgcgagcttttttttttttgagatggaatctcattctgtcgcccaggctggagtgcagtggcgcgaacgctcactgcaacttccacctcccaggttcaagccattctcttgcctcagcctcccgagtagctgagactacaggcgtgcgccaccacgcccagctaatttttgtatttttagtagagatgaggtttcaccatattggccaggctggtcttgaacccctgacctcacgtggtccgccgaccttggcctcccaaagtgctgggattacaggcatgagccactgcgtctggccaccagccagcttttatatgcctccccaagattgggaggaaagatggttgtccagatccactgtgcttagcctcacttcggacttctgtgtaaacaactcttggtgtttacaaaccaaatagagttatttctccactcccaaacctacccttgccacagaggtagtgtgactgaaccccctggtttgcccagttctgttctaatgtacaccagttttcccagtataattattgatagcaccccctttgccagtttggaggattatctgtctggtctctatgcccttgccctaggattcagggcaggggtatggggacctgtgctgtatccccatttcggtagaggaaggatggggaaatgtatgctgtgtatggctgaacacgtacatgtacaagtgacagtcgtgtggaggcgaagaccagtggctgccacaccccaacctgcacccttgaccacggtctctactccttgctctgcagagacaggcaggtgccccaggtggtagcagtggcagtggtgggtctccagagctcagcgccctgcgactgtcagaacaactgcgagagaaggaggagcagatcctggcgctggaggccgacatgaccaagtgggagcagaagtatttggaggaacgtgccatgaggcagtttgccatggatgcggctgccacggctgctgctcagcgtgacaccactctcatccgacattccccccagccctcacccagcagcagcttcaatgagggtctgctcactggtggccacaggcatcaggagatggaaagcaggttcggcattgcaggccaggcacctgaggttgggggggtgggtggcaatgtccagtcactgccctgcccttgatccctgataaacaggcccctttccccatagagctcagcagtccctcctgcttctgagctgaacctgcatgattggcacaccaggcactgtaaacatgcatttgcccagaaataccgagtccttggtctgcccaggagactcttactgtggaggtgttgggtgccatccagtgcttgggccctgcctcccctctccggagtgccgccctccaggatgagggctgtgccgccactatcatctgatgaatctggaacccatccttaatggcctgcctttgctggtgtgagaagggcccagggccttatgcactggtggttttcagagcctgggctctaagagcatcaaattccagagctgtggtgccatttctaagccctctctgggtccctgctacaagcacagaaggatccagcctggcagggttgggggagttggggggggcttttcctctaactcctatgaggcaggaagggtggaggctgttggatctgtgggtctgacaatgtgggcatggcctctcacccctcaggttaaaggtgctccatgcccagatcctggagaaggatgcagtgatcaaggtccttcagcagcgctccaggagagaccctggcaaggccatccagggctccctgcggcctgccaagtcggtgccatctgttttcgcggctgcggcagcaggaacccagggctggcaagggctctcttctagtgagcgacaaacagcagacgcccctgctcggctgactacaggtaagaggaggctactgctgggatagattgagaggtaatttctcctgggcctgaacacagattgccagacctttcctcccagaactgaggctataggagccagggcttcctgaccctcttccaggggagctggcttattctctgcctctagtgactctacagcgcaaggctctcctgccagtgtgaagaggggtacttagtccccatcaccataaattctatcatgcttcagccccagccactgaactaagaaaaatagagcttcctgtgcagatacaccttgtatgcaagctccctccactcttccttctaagcagatgccacagaaactctagaagatttaatctataaggaagggtcccaccacccaaaacatttggaagccaatccaatctggtagttattcccatttgaaaataggagcatttttagtcttaaagttcttgcaaatcaagagcagcccactccaccttgaatccccagcagggacagttaacttagagtgtccttcaccagggccacatcttacaggcatggcaataaccatccacctacctttccagcagacagagcacccacagaggagccagtggtcacagctccccctgctgcccatgccaaacacgggagcagagatgggagcacccagactgagggccccccagacagcacctccacctgcctgccaccggagcctgacagccttctggggtgcagcagtagccagagagcagcctctctgggtaagtcctcctgaccccacttctgtgctaggtagggccgagggggcactggggtgtgaactggaacacaaggccttttcttcccagaccccctccgggtcattgcccgcactccatggggagccgtgcatagccagaggtgagcagggtgcctggcccacctcaatgtgaacatgagggatggctggttgcatgaatagggaaattggaaaccctgattagaggcagatccagaattcagaaagaaagcaaccagatgggaggcactttagctcctctttcatggtcttccctacatagttaatttccaatttgattatccaagagaatggagctcgcaagtcatgccgatggcactctggaagcctgtttaaagagtccgggaaggagaaatctgagaagatgccatttctttttccactcccctttcacattggcctttgcatatttgcctgtgcctcatgatctcagaaaaccacaggcatgaaaagaatgctgcagcctgcctccctcagggctctccattgctctctctaagccctccaaccagttcaaagttagaaacaaatgcatcctacacatcggaggttggtgggctgggctgagcactgaaagggggcagagcattgtgcttggttggccgagttctgggaacctgggcagcagaggtgggaaaagttggtgaagaacgatctttgtctttcaaatgtgccaggattttaaaagcaatctagtaacactcattggcatgtgcctgtgttcttgtctgtctccagactctgtagctacatccagagtccaggacttgtcagacatggtggagatactgatctgaaggaggtggtgcttcaggactctgagccattctctcccctcctctgccctgtgccactctcagccatttcagcagccccgtcaaccgctgctccgtccctttccccagccagacactcattcccattgaccatctggtcccaggagctcaggaggaggaccccaggggagaggagagctgtgagagcaccggcacccccagaagactctgcttcttagcccacattcctccgggccttatggagaatgaggattcagccttgacttcttgcccaaggcctgctactggggtagcaactgacagctcagaaaggagctgagctccctctgccctgccagttgtcagtcaggcagggagggagtggctgtgttggtttggggaactaatttccacggacggctgcccgtggacaccaggtggactggttcactaatcaagtcagccatattgttctctggctaagtttggttccagccaacgtcatctgctcttcagttcctcactgccttcttgggatactaagacttgaattttttggggactattaagggtgttagtcttggagaagacacagcctcaccttctcacttgctgtgggtgaggggccatttaagtggactgggagacagtgcgcagtttgtatataattccctttcttgtggaacagaagactgaggcctgcaggttccgatgtgtctccatgggctgtgctcccctcttcctactgtcagtttctgaaacttctgactggcctcccagttatgcctcctcctcaagttcctggcccgtggatgttaaagctgctcgattcccaggatctcggctgccttttcctctatcttgagccctataaatgcccacgggacccccaccaccagcctcttgaagtggctccacagctcctgtccctggaacatcctgtcagtttggtcataaaccctgagccagatgaaatgagccaccgtgaacagacatctgccatgcccccaggtgggcttcggtggccctacccggtaccagttctttctgagaaactggagatgtcttgttagcataagtgtcttcattcccacctggagggtttgggagaggagcaaagcagttgaaaactagttaatgagctacaagagtcaaatagtcctctgaatggagcccccatcacaaaacagtgcccaggaggctggctcctcaagctacccatgcccagcgccctaaagcagcaccagatgctttggaattggggtgaaacacccacatggcagcctgctagcagcagtgactttgacttctggtcttaaagagtccctcacttcagccccaggagctattggtgggttttagcagttttgtctttaccgtttttagttctccttgattctttgttttcttcctttatcgtttttaggtttggtatgtgttgttttatttccatggttcctcaagtttcctttttaaacatttgcatttgctggacaattgcaattttttttaaaaaattcccctacccctgtttaaagctgaaaaatacatttggttcatgtgcattgtttacaaagcaaaaagaaaaaagaggaaaaaaaggcaaaaaatattgtgaaagaaaaaaaacaacttaatatattttggattaatatttggtatttcttttaaagtattttttgtgctgtgaacattttctgccaaagaccatgatgtgtgtctgtatgtttaagttatcgtaaatatttaaaatgtaaacatggctgttttgttatgccaccctgtaccaggattgctgccgcattccactgggtataacagtattttaattaaaaaaaaataattaaaagtgatgtctttgcacaggtgagactttgcactgagggaagggaaagggtgaggattttggggggccacccaagtcatagtccaatctcttcaaggacccaagatagaatttaggaattttgtgaagctgcattaaggatagagttggaatgaggatgtggctggcatttttcccctttcatagataacatttcttgaaggctgggaggggaaggagggcctggcagatggcagcctcccgaggtagggctgtgttctaatcagctttgttcggccacacgctgtggttatccacagtgggagtgggtgtccaaagatggctttatccttcccccactccttttcccactcccacctagcacataaagttttgtccgaaaccatccagaaggccaggcaccatgcagaggacattcaagaatgtgcatgttcttagccaccgcctccctcctttgctgtgacatcaccactctttcctgatgctcaggaaagcatattgctccaattcaaaattaaagaaagccattctcagtcttgcttgttcttgtatcagaaacaaaatacctgtcttgtgcttctataagtgtgttaggaccctgaggttcccagtcagcatgtggccagcagttagctggccatgaggcagcagcaggctaccagacagcctacgtgacatgtgacaggaacagtttcccaccatggccgtgagtgaagtgtcttcggggccaatgtgggaactcgggagccatgttgatgagtaactaagttgagatcctagagaaggtgtcttcccgagctggcctaccagcccacaagtatgaagacaagcaggtggaagaattggaaacatccagaaacttttctagcaactttgcagatggtgatgggtcccactggatgaggagctctccatgcagaggcatcaaacccaccccatggccacacctccacccaaccctccagcctgcctcctgccactggggcactatctatgccagcctttctcccattgagccctgaactagagtcagcttcacaaataggttactcacctgacatgcaggcctagtgcatggaggcggcctgaacaatagggctccttctcaccctcccacagctgctcctccctgggccacagcagcccatggctacatttgctgacttgctgtccaaaacaaaatgtcggtgcctgtggcagggagttccaaaggacagcttggcaactcagacctgtgaacaataagccctgacaacagtgccatctcaccccagtacctttggccaggggcttccaaagcatctgcaccttctgtgagatccagtctgtggaaagtcactttaatgtttccttggcacagaccaggaggaataagaaatcggtcccagtgtacccagcacatgtacgtgcatgtgcatttgtgtgcacatgtgtacatgcgtgcctgaccatgtgtcccagagaaaggtgtgaggggcaccaatatcttctggctagtgtccctgcagggcatgggtgctctcctgccacatggtgaccagtgcatctgagtgacatttcctctcgggaaaggggatgagtgagctgctcggtgccctgtgaaatgcagtctaatgaagtttcagaactagtggagctgcaggctgtggcagggatggtgaggccttgtggagggaggtgtttgccttctgtgtctaacacctgtgaaggggtggagcctgggccagagcccaggtggctcagcggggccctttggaggccaagttcctctttgagggggcagccctaacctgcctgccctgcctccacccagtgtccccaccaacagggctggggatgtggctcagggggcagcccatggctgcaagggctggagggcagcttatgagtggctgccccagcctctctccctcctctcacctcctggttaattgttaactcttcccctggcataagtatgcaccaggctcagcaagcttggtgaaaatatgccaagacaagggcagcaaattggggcccagtcacccagagatagccaaagccgctttactgcacccgaagaactccagctagacaggaaagttgtttgcagtaccactctgccatcaactagcacaagtaaggggctggccaggatgaagctgtccctgatcaggccttgctgggagcgaccgacccctctggaggtggttcagaaacccccgcaaccagcagtgcattcctggacgtgccatgcctggatctaacacatgggtgaagtgccacagcaattgaaccctaagcatcttttttttttttccaaacaagatagaattcacataccataaaattcacccttttgaagtgcaccattcagtggtgttttgtatcacagcatctactttaagccagcggtcaaccacgggtcatcagcaaatgccccaccagtgggccatgtggacacaattagaagtgttattggatctgctgccttcacacttgtcggctcctctttcctaggctgacactttgaactttctattgcagagagtcccctttcacccatcctgggcccagcagccccagagtacctctgctgggctgcagccaggacactatctgctctgagctggaatctcccacatttcattccctaggctgccagggtggaggtcctgaggtttggaaaggaggcccatgagccctgagcccaaggcacccatgtttgctaaggtttgccagagtcaaggagaattggcaggggtcggtccaattttgtgaggcctgaagcctgtataatttggaggaccctcttgaagaaaaagaatgcaaagtggtgaatacaaaattagatctagagttttggaaggggcttcttcaagtgagcaccccgaggtacaagattcattagcttcacagtaaatctgtctgtctgggcattgggcattgtgtttccctgatgggaatggagccctgggaagtacccaggacttgggttcatccttgtctctcccaggtgaggcttggatctggaagtcaatgaagttgcagtttttcttctgcagatgaagtggctggtactggatatccactaaaaacagccccctctgtagggtggaggtacccacaaagggagcctgcggtctaggcgcaggatggggttatcaccacagagcctggatgaaagggctgaccagtttgctgaggaccaaactgtaaatgactctcatgtgcaccctgctctcgcccaccagccaaacctccagcccccagcaggagtgggagtggggcacatctgacagttggctctcggtgccctggagagccatgccacttgcacttgattgcaacagggacacattctactctactctgtgggcccatcagcttttgattctgagccaacctggtgtcatgatctgtcctgagataaatgcctcttgcaagtccaaaggctcctacctgggggcacattccaggtgtgttgggcaataatttggttatttccctgcacaggtttgcctcttcttgcatcaagttggccttcttttgaagcttcaggagccttgaaaagagc

SEQ ID NO: 306 - DNA, 121691 bp, Homo sapiens
aagatgaacttcaggcaaaaggtaaatgattccagttggaagttctgagatacgaaaaggaatggttgtaagtgtaactaagcaagcactgacaaaatcaagtaacaatagtagcattaaacttttgtgcatgtaggcataggctagaactaaaattgttgacaataagagcaaatgagtgggggtgggggtgatcataaagtgttttaatgttctcacgttcttcaggagaagggtaaatatatggattaaatttagacctggttaagtatgagtttaatataaccagaacaatcattaaaagaacagccataaagcatacgacttccaaaaaaagtagagacaaaaaagtaaaatgagaaggaaaatcaatccaaaagaaggcaaaaattggttgggggcatgggaggagaatagcataagaaagaaaatagaaaatttgtaatgaaatagttgaaataaatccaaatatacctgtagctccagtaatgtagtgaactaaattctcaagttaaagacaaatattgtcatatgtaataaaacaaaatccacacttaacacattgggacacagaaatgttgaagctgacaggatgtaaaatgatatacaggcaaatgctaacaagaagaaagctggcaagctggtatggctttattaattttagacaaaatagactctaggcaaaaagcatcaatggagataaaatgagtcatacataagaataaacagctcaaaatttccagaagacatatcactttaaaatttccatgtcactaataatatagttccaaaatacataaagctcaaactgacggaactacaggaagaaacagataaatctattatcttaaggagaaatttgcatacagttgtcacagtaagagatcaggcaaaaacagaagagtaaaaagaaggaacatttgatcaacacaataaaaaggttgaggggttgaagtaatgcacattacacagaacttcgctctcaactattgtagagcatatatacttttcacatgaaacatttatgagaattaaacgacatgctacaccattaatctagctttaacaaatttcttttttttttttttttttttttttttttttttttgagacggagtctcactctgtcgcccacgctggagtgcggtggcgcgatctccgctcactgcaagttccgcctcccgggttcacgccattctcctgcctcagcctcctgagtagctgggactacaggcgcccgccactacgcccggctaatttttttgttttgtttgttttgttttgttttgtttttgagatggagtctcgcactgttgcccaggctggagtgcagtggcaggatctcggctcactgcaagctccgcctcctgggttcacgccattctcctgcctcagcctcccgagaagctgggactacaggcgcccacgaccacgcctggctaatttttttgtatttttagtagagacggggtttcactgtgttagccaggatggtcttgatctcctgacctcgtgatctgcccgcctcgcctcccaaagtgctgggattacaggcgtgagccaccatgcccggccaactttctaaagattgatatctgagcccaaagctagtatctgtgaagcttttagaattttttttttttttaagacggagtcttggtctgtcacccaggctggagtgtactggcatgatctcggctcactgcaacctctgcctcctgggttcaagcgattctcctgcctcagcctcccgagtagctgggattacagatgcccaccatcacgcctggctaatttttgtatttttaataaagacgggttttcaccatgttggccaggttggtttcaaactcctgacctcaggtgatccgcccgcctcggcctcccaaagtgctgggattacaggcatgagccaccatgcccagccttagaatttgacctagagacaaaaacagaactaccatgtctcagagctgtggaaagttcagtagtttcaactaaagaattcctagaaaggtgtactgatctgttctaaaatgaattgtgatagtggttgcacagctctataagtatactaaaactcatagaattgttaactttaggtgaattgtggcatgcaaattatatatcaattaagtttacgtatgtatcaacttgagaagctagaaaactatggaaacctgtctgtttctatgaggaattttaaaaactttcagaaagaaaatatgagctaatgaagctaaagtatttgggggaaaaaaagaagtctgacttccaatgcctcaaagaaaacattagacttaagagtactgaacacttactatagaaaccaggagacatgacgaagtgacatactgcactcagtgaattaatcatgtaatagctgaaatcctaaaggcttagaagaagagaatgaaattgaaatatggactaattgtattccacaattagaagaactggaggatccccagagtaaaaaaaattaacaactcaaagatgatggacaaacaaacaaactccattaactctaacagaaagtgattagaaaccatttccaatgctaactgaataatgagatgtcagctaggtacaagaggaagaacaattgaaaagttgcaatatgaacctctttgctatattcaccagaaagttataatgaaaagtgtaatggactgaattgtgtccctccataattcatttgttgaagctctaacccccaatgtgactatgtgcttggaggcagagctttttaggggagtgattaaggttaaataagatcagaatagtgggggccctaatccaattgaacttctattcttaaaagaaaaggaagcgacaccagagatttctctttttctgtggggacacagagtagaggtcatgtgagggcagagcaagaaggtggctgtctacaagccaggaagagaggcctcaccagaaacccatcttggcagcaccttgatcttggacttctagcctccagaactgtgagaaaataaatttctgttgtttaagtcagctagtctatagtcttctgttacggcagcctgagctgactaacacagaaagcaaatacagaagcttctgattaaagatagtagagcaagaacatgcattaatctacaatcacttctaaaatccctttaaaaccaccattaagagattttttaaaggcataaacaaacaaggacaaaaaatatggcagaggagacaatagcaggaagatgttcaaagctggaaagcaggacatgtagtaacttattttgctgatctgagaaagaggaattctaaggcagaaatagggaaagcagagaatccatccaaaagactcaggaattggtggaaccagttaactttgcaagtgaaaatgaagatggtattgaaaataagagagttgtttaaatagattaaagagctaaaaggttgttaaacctccagataccttcctgctatagtttgcatgtttgtcccctacaaacctcatgttgaaatttgactcctgatgttgcaaggttgggtagtggcacctggtgagaggcatttgggtcatgggggcagatccctcatgaatagattgatgccctccctgggggtgaattctttctctgttagttctttcaagttctggttgctaaaaagagtctggcacctacccccacttgcttcctctcttgccatgtgacccttttgcacatgctggctcctcttctactttccactgttgaaacgacttcaggtcctcaccagatgcagatgcccaatcttgaactttccagccaccagaataatgagccaaataaacctcttttcttcgtaaactatccagtctcagatattctgttacagcaacactaaatggactaagacacctccccaactcagcacagcaagatgtctcacaccacctccccaaatctggcaaagtactggagttttaaatattggagaggataaaactaagggttaagttgaaggcaagagtaccatattaaaaataggaagattttgagatattctatctacatattgattttaggattatgggtccttcttttcccttggctgctggaatgctgttagttgggcctgtactctttggtcaagagatggggaaaatattccgtgggaaattagaccagcccaaaagatacgtggaaagatatggacattggggattcctaaataagtggccagatgagccactgagaatttcatagtcaacagattccatccatatctatacagtttccaattcaatttttagtgctcctctcttcaatgagcaaccaggcaaggatgatttcaggaactggtctaacaataaagactaagattaaaaacaaacaaaagaaaacggaaaaattaaaactatacagagaaataaaactttttcaaaagtttttaagaagtgttttaaaaatatattattactatcagagctgtaagagaagataattattatgaagcaagaatataccattaggcctggcgcagtggcttacgcgtgtaattcccgcactttgggaagccgaggcgagtggatcacgaggtcaagagatcaagaccatcccggccaacatggtgaaaccccgtctctactaatacaaaaattagccgggcatggtggcgggcgcctgttgtcccagctacttgggaggctgaggcaggagaatcaattgaacctgggaggtggaggttgcagtgagctgagattgtgccactgtactccagcctggtgacagagcgagattccatctcaaaaaaaaaaaaaaaaaaaaaaatatatatatatatatatatatatatatatatatatatatacacatacacaccattaaaaaggacatttaagagaacaaacaagctctgggaaatgaaaaattcgagcagagttataagataaaattaaagaaattagttagaaagattagcaaagagatgctttaacagccagaatataggaattttagaaagaagatggaaaacagagtggggatatcatcaaggacataattcaagaaaacatcccagaactgaatagccagtgtttgcagattcaaaggatccacaaaatactctagacaactgattaaaatagaaacacatcaaggtacacattaaaaactttcagaatatcaggaataaagtattccaaaattttccagagggcagagggcaaggggaggaaaaggagagtgggagagaaggttttatacaaagggtcaagaatcataatggcatctgactttccaaaagttacactgaaaggcagaagacgatgtaaaaatacctttgaaattctaaggaaatgttatttttaacatacaattctatgcttagtcagtattatgaataaagtgtttataaagatgtttggaataaagactttcaaatatgcaaactctcaaaatacttatcttccatgtatactttcttagggaagtgctggaagaagtgcccactatataaagaaggcaaatcaagaaaaaggacgctatccaggaaacagggaatctaaaaagagttacacagggaggtccctgcatgatggaacattgcaagatgatgactttacagcatctagggaataattaatccaaatgtccaagatgatgaaactgatggatcagctgatgtgtttgaatacattgagagaagttttaaacaaccgagggatgagtttgggcatgaattattgatgaatacgtagaaacctaagcaagtgaactacatgctaactttagtggggaaaagggctgtgcaagaaaggaaaaattattgtcacatggctaagctatgaatagcatttacacagtcataactatataaacagtgtttatggtatgatggtagtaagaacaggcagttatatgtgtgtggtattttggagggtataaaagagagcaaaatatacatagttttctgaaggagcaaatcattttaatacataatgcccaaaatagaaaaaccaacaggtcggtcatataaacatattatttcaagtgatagaagtcaataaacagctaaaggggtttaaagcagctgccaggtgagaatggagaacaagtggtaatgttgtttcttggtaatatgccttgtggaatggtggctcacacctgtaatccaagcactttgggaggccgaggcaggcatatcacctgaggtcaggagtttgagaccagcctgaccaacatggtgaaaccccgtctcttgggggccgggcccggtggctcacgcctgtaatcccagcacttcgggaggctgaggcaggcggatagagagtcaggagatagagatcatcgtggctaaaacggtgaaaccctgtctctactaaaaatacaaaaaattagcccagcgtgttggcgggcgcctgtagtcccagctactcgggaggctgaggcaggagaatggcgtgaacccgggaggcgaagcttgcagtgagccgatatcgcgccactgcactccagcctgggcaacagagcgggactccatctcaaaaaaaaaaaaaagaaaaagaaacccccaactcttctaaaaaagctgggcatggtgatacatgcctgtaatcccagctacttgggaggctgaggcatgagaatcgcttgaaccggagaggcagaggttgcagtgagctgagatcataccattgcacgccagcctgggcaacaagagcaaaactccatctcaaaaaataaataaataaataaataaaccaacaacaaaacaaactatttgactctttaaactatatttgtatataattttgttaaaaattaacaggccaggcgcggtggctcatgcctgtaatcccagcactttgggaggctgaggcaggtggatcacaaggtcaggagttcaagaccagcctggccaagatggtaaaaccctgtctctactaaaaatacaaaaattaaccaggcttggtggcgggcacctgtaaacctagctactcagcagggtgaggcagataactgcttgaacccaggaggcagagcttgcagtgagctgagatggcgccactgcactccagcctgggcgatagagtcaggcactgcctcaaaaacaaacaaacaaaaacacaaacaacaacaacaacaacaaaaagccctaattttttaaacaaagaaaatgcctgggccagatgcggtggctcacgcctgtaatcccagcactttgggaggcccaggcaggcggatcacgaggtcaggagatggagaccatcctggctaacacggtgaaaccccgtctctactaaaaatacagaaagttagccgggtgtggtggcaggcacctgtagtcccagctactcaggaggctgaggcaggagaatggcatgaatccgggaggcggagcttgcagtaagccgagatcgcgccactgcactccagcctgggcgacagagtgagaccgtctcaaaaaaaaaaaaaaacaaaaacaaaaaacaaaaacaacaacaacaaaaaaggaaaatgcctgaaacgtattatgacataaaacagaaacatttaatgttctctaagcagaaagacatgactctgcaaatgtaggtgacttgaaaccaatatgagaatgaaacaaagagaaattatcagttgtggaagacctaaaagcttctgagcagaaatttcaaaagtaaatagataaatacacaaaataaattacagaaaaaagagaaatatgctgtcacgataggaaggttggtgaaatctggcttactgcttgtgttagaataagctcttacttattaccatgaggactgtagtaatttgttacagcagcaacaaaaaactgatgatgatgtcgccctcgatcagttgtaccttttcctcaactgtggagacctcctcacaatttaaaagaacatcacctaggttttctccaggaataaggtcctgtcttctgagaggccagactaaatacattaaattaggttaagacaaagccattgtaacaaagagacctccaaatggatttaataagataaaagtttatttctctgtcacataagagtccggccagtctcagctgacagtaggttgtgctcatgtggccccagaggcttctgagctcgtccaccatgttgctcttctccctcgaagcaccctgcttacctccgcaatcaaggtgaaccatcgccactcacacagaaagtgaggaagcagaagctgcgcgtatcacttttgctcacattctactcgaaagaatttagtgaagtacagggaaggctgtgaaactagcacagcaaaaattctatgagtatggacaaaggagagaacagatttcaggggacaatttgtgtccatcacctgcatgacccattctttagattcttaagtcccctcagcccaaggaagtctcttcactttggccccacattgtgcatccccattacaaggttctggtggccaccctgattcttttgtgagatgctcactttcttccaacttagcaaagatccctggctcccttgtaggataataaagaggcttctccaggctttcagcccaagacactgaataaggaatgtttttcatatttcacatgccaatataaaatttactttgatgatagacatcatttttgccgaatttctttttcaccttggggagaatgaaattctgcacatttgagctaaacaattcaacattgaggtttgtggttaaaaaaaatgcttatgacaagtgaagatgccctataatactgtgacttctcataggatcacttgcctattttagtttcagttactgtagctaatgccatttgtcaattgtttaaagtgctatgaaaaatgtaatttttaaaatgaaatgctgaacaacctggaactaatatctagatcagcactgcccaatagaaatgtcaggccataaacataattttctagtaaagtcaaaaaaggtaaaagaaacatatgaaatacattttaataatatattttaacacaatatatctaaaatattaccactctaacattcaaccaatataaaaattatcaatgaaatattttacattctttttttttttaataccaagtcttcaatatctggcatgtactttgcacttacagcacatctcaattcctaccagccacatttgaagtactttatagccacatgtggctagtgcctactatactggccagtgtagaactacatgatctcaatgtgaaaggtatgtgaagaaagagggaagtgaaagcaggctgaaattcctgttttgtttaaagttagatatggccactaaggaacattcagtaaatgtaataactagtgtttggtacaaatggttaaccatatggaaaaaataaaattgtatcatgtgccatacataaacataaattccagatagattaaggagctattttttaagagaaaaaagtacaaaatacaaaaagtattaattgggggacctttgaaagacacaaaatgcggaagccataaaggaaaagattgtcagatttatctaaaatagaaatccaaaatttaagttaagtaaagaacatcataagaaaagttaaatgacaagggatacagtaaaagaaaacatccataaatcaataagaagacaaataagctaactaaaaaatagaatatgtgggcagatatttcaaagagtaatttgaatatgcaataagtatatgagatacttaaccgcactagtgatgagggcaatgcagattaaacaacaataagctatttttctttcactagactgtcaacagcaaaatgaaaaacattggcctattaccttgtgtctctcatttatgccacatttggaaatgtatatttgtaaaatcttttggaaggcaattcagcagaatctatcaaaattaaaacataactcctttggacttgaagattccatttcagagaatctgttcttctaaatatttatacatatgcacaaagatgtatgtgcaaggatttgatgtgtattaccagaactggtaaaatccatcagttcatcccaaccaaaagaacaccacagggatgcctctgtatgccctgtcatgagaacatcctcgagatctcaacttacttagatcagtcaaaaaagcaaatcctgtagatcacaactttttgttgtgttgtccatttctataaggctgaaaaagagcacacacatacaattgtgtgtttaaacccatatatgtgtgagtaactgcctagagaaagggctctcagaacatacatcaaactgggcagtgggtaagagagacgagggtgtgtgtggagggacatatttatattttatttcacatacttctgtgctgcttgactcttttacagtgcaaatggtttaatatattacttgtggaaggagaaggtttatagagagagccacattcccaactgctcctggcaaaagacgaggctgatttcaggacttggagccaccccttctccaaccacccacccccacccagctgagtggttgggtcaggtccatgttgctgagttgtctctgggtgtctgtccttgcgggcaccaggtattctcagcccacaccagaggtcaaacatggaacacccatcatctctgtgtagctttgaccccacgctcccatctacccatctaccccatggcatctcaagtccaagactggctttttaaagtacaagtcctgctgatggtatttcctggccatgctgaaatatgtctcctggaggaggagaataaggtcaaccactgtgacaaacaaaaccaagagtggagggccaatgtgtggattgtgttgatgactgtggctttcatttccccaaggcaaagaaacctcaggaggctgtggtcatggtttctcattttcatgctgaggctttttgggaaatttcagaagttgccacccacaccttgttaggggagggagaggaaacttcctcttcaggatgggctggggattgtgggaagacctttgtgtgagaccaagtgtcatgcagagacagcaagagagagactgggaatcaattccttctccaagggtttaattaaagtgtggggaagtttgcaatcttattcagaagttaacatctgagcatagatttgaaggaggtaagagatgaagccatgtgggtgtcagacagaagcattccagagacagggaacagcagtgcaaaggccctgaggtaggattgtgtctggtttgttggaagaacagaaaggaagcctttgtggtgtggcaggaactaagggagtaggcggtgagcagaagataaggtcagagggaagggagaaaggtggagagtgagaactaccttgacatcttggaaagactttgccttttattctaggtgagttggggaaccactggtggtctgaaagccagagagtacatgatcaggctgacgtttaacagaatgcctctgtctgctgtgttgggaacagactgagcgagtaagggagaaagcaggcaactgcagctgaccaaaagagagacaggagagctgagatattaatggagtgaccagcagcatcagaattaccaggaggcttgggaaaacagattgttgggccccagccctggagctgctacctgttagtatgggcagtgtccaaggaatttacattacaagttcccaggtgatgatactgctggtctgggggccacactttgagaacttgtctttgtagaatttatgaaaacatttgtttatcaaagttctcaaggaagcacattgctcgctcctgtgtccccagtgcctagcgtgatgcctggcacgagtcttcatcgagctcaggctctgggccaggctcagtgctattgaatgaggttcatgagggtcccaggtttgaactgtttggaggtaactggtgatgaaactttcacaggaagtggtcattaaagggaaaggattccttgtaattacaataacaacaggtgtgacacctacccagcgtctgcctagatgttttacttgtatccctctccaattaaatcctgtaaaagccctgggagtcgggcattatcccgggatttttatgaatgagagaaccaaggcttggagagtttaattttcccaagaccacaggattaacaagtaccagaacccagccaggcctgagtgggagctctctgctgtttacatcataggccgcctgaagaagtcactgacaagacctagtaattaaagaacctcgagaagctaggagtttcattctttgaggactgtgagcttttttaaaagtgcaaagaatatgccatcctttaaaaaaatgcttcccatctgaattgagattcctgttcacacaacatgttttgagcctccagcccttcctggcagaaccctggtagcagtggctgtcccaacagaagtatttttgctgacttttgtggcttaaaagccttctctgatggagcacttttcctcccctcttcctcttctcagcctcctccggcaggatgaagggtgtaagattttgtgctgaggcgctgaagcttgacaaattgaggccagcctatctctaaatggaatccgtgtatcttgctagggagggagaaaatcaagttccagcacttccctccttatcagcctctccttttccctacccttccctgaggataaaaataaccgcttcccagggcctcactgcgatggagcaactgtgccccgaagccaggcctagctgtcagagcagctgctccccgaggcacggccccgcgagagccttggggtcaggacgggggcctgtccgcagggacgaggtgtcccaggacagggcaggggcccttggagcctcaccaagagagggggcactggtgcaagtttgaccgcgatggtgggcggctcacaaaaatacatcaggaggcccggaagtccatgcactggctggctccaccgcctttaagtacacgaggtctatctgcagttcttaacctctttgagggcacaaggactccctagaacaaatgatgacataccacctctctgtgtgcaatcaagcatacacacaacacacagaaacatggacgtggacacaaatacgcacggagacacatacacttttgcacacagtttcatattattggaaggctgtcgaagcctggtatggaccacagattaacaaccccaaaggcaggttgattatagtgatgcagaacgattataaaaaaaataacaatttggcagggcgcggtggcttacacctgtaatcccagcactttgggaggccgaggtcagttgatcacgtgaggtcaggagttcgagaccaacccggccaacatggtgaaaccccgtctctactaaaaatacaaaaaaattagtcgggcatggttgcgggcgcctgtaatcccagctactcgggaggctgaggcaggagaatggcttgaacctaggaggcagaggttgcagtgagccgagatcgtgccagtgcactccagcttgggtgacggagcaagacttcgtctcaaaataaataaataaaaatataaaaataaataaaattttgtaacgtaaaaatagggttagtaaagcgtgctaagatctttctggaaaacaaatatatgtagtataaattctaataatagatacggaaacgataaagttgatcaccgatggtaagataaaggatgatttctatttatttgagttttcccactaaacaggaaagcatgctgctttttcgcaaccagaacggccgcatccaggcgtttccggggacctggggcgcccactgagctgcaggcgcggccggtggctccagcctggcccgtccgtcgggaaaggagggttacagacaatagacaagcaaacattagacgcagtgaccgcgtggggcggggaccggctcttgcggagagggtgacccgagcccttcgcccgccgaggcactttaaaaccccagcgcgttgcccaggccggcccgcccagagcgaaaggtgcgtgcgcgctcccggggaggcggcggcgcgcacgggcgcgtcccgcgggcagcccccaactccggacgatgcagcgaggaggcggcggcggcggcgcgctccggaggtctgaagccactgctggctgccacgggccggcggtgcgatgagctgggcagccgcccccggctcggggctgtgagcggctcggggccgggggtgggcggcggtgcggcgggcggccgacgctcctcttcggcggcggcggcggcggccatgcgtgggcggcgcggctggggcggccgggccggagttgcctcccgggggcccgcggctgagggccccgccgccgccgccgctgctgcttctgcttgcgctgttgccgctgctgcccgcgcctggcgctgccgccgcccccgccccgcggcccccggagctgcagtcggcttccgcggggcccagcgtgagtctctacctgagcgaggacgaggtgcgccggctgatcggtgagtggggccgccgaggccggggcgggcaggtcgggccggctggggcagcttccggccgccggcggatcagtctgcgagccgtggacctcgggcgagtaccctccccgccccccgcgcccggattcgcctcgcggcccggtctctgcctgccgtgctggctgggaggtgtggtccctgcccggtccccagctctgggtcagccttcgtgccgccctcgctgccccgccgcgatagacccagattcaccccatcccatcctcctcactgcctccttagcccttctccctagaagagtcagtcacccttacaactttttttccttgctgcacgaagtttttttgacgctttctatgtgtgtcactctagggccctcgattttgaatatctcgaaattcacgttttagactgaacttgcaaaccctttgctgtggttttgatgctccagtagaggccacgctctgtgcttacccttttacaaaaaaaaaaaaaaaaaaaaaaaaaacgagagagaaagaaggggaggttataagggcaccaaatgttcgtggcagcctccaactcttgggacgtagatttggagcatatgcttagattctaagcatatttttagtgaatgaatcgccaggtagcagacctttttagtttcaatacctttttggtttttgcattgggtgtgttgggagtttggactgactctgtacttctgggccactctcctacttttgagtatcttgaagggaaacaagaacttagtcttgggtcggtttgtggttccatttacttgcttagctttgttgtttggggaattaatttgaaaaattgctggggtcttatgttaggactttgtggattctggaaatgaccccttagaggaagatctgacaggaacgaccccccaaaaaggaagtccttggtacctagacgtttgcattcttttgttattatggcagtatctttatttcatctgaaggtggtgcttctgagtgtttgaggggaaaaattattctctattgcatccattatttgtcagtattctatttttttttaagtaataagactttgttgaggtgtgttgagattgactcagtgtagaaatggaattactgaaagcagactctttagacattacatgtacggatttgcagtttttagccaaagaagaatgctctttttatgaagtcgtgctcattcttaatccttcttagtctagctgagttagctgaatgtagtttagctgaattaaaactctacttggggtagtacttggaacacaagactaagatttaggaaaaataatacaagacgactcatatcacattaattttagaaatattaacgtattatgcatggttttgtaaaggctttttggttaaaagcacttatatagcttgtgactttgtttacatgggtaaacaaagtcagaggtgtaggtaggagacagaagacaaccagggactgacattgaattcctgccatatacctgcccctacatgctttatacacataatttcttctaattttctcggggcccagtgaggtaggtggcattatgcctattgtagagatgaggaaagtggggttttaaagtaacttgctcaaggtcacacagttaatttttttttagacggagtctcgctcttgtcacccaggctggagtgcagtggcgtgatctcggctcactgcaatctctgcttcctgggttcaggtgattcacctgcctcagcctcccaagtagcgaccacttctggctattttttgtatttttagtagagacagggtttcaccatgttggtcaggctggtcttgaactcctgagctcgtgatctgcccgcctcggcctcccaaagtgctgggattacaggtgtgagccaccgcacctggcctagttcatatttttgaaaaaaatgaaacagtgttgacataggctgcaaagttttatcgaatgaaatgaagattttgtctgtagaagtttgattatgtcatggtggaaaataaatcattgctaattagcacttgagttatatatttgttaccttattcaaaggttggcctggaactaattttcttagcagtatttgcagcagaggaagctcctgtttgatgagcatccaatttatgcccagaaatgctgttgctgggagggtaggaagcattgtttcaattaactcccttgtctatccccgggggcgagagagacttctagtagtattttctctagtgcaaatagggttgacctgttacagaggatctctagtcactccatcctgccagattcaggttcgttgtttccatcccttcccatctccctcatacattctacctttaaaataattccttggctcctccaggtagggaagagccaagtgggtaggactgagatgtgtactgagatgtgtacaaggcactccgaattctcagaatgcagtctctcacagaagctgttatggtacttaaggcttcttggaatagtagctttgcaccgtattttagaatcactacagattttgtgccttctgaacgctggcataggaaacgaaccattattttataatatttttaagacagtttagagttccaagtaagaaacttataaatgaagttgatagtgacaactttataaattgaactaattacccttgatatgagaataaattgttttaatccagttaatatatgcatatagttttaagagaaccaaaaggcttttttttttttttgagacggagtttcgctcttgttgcccaggctggagtccaatggtatgatcttagctcaccgcaacctctgcctccaaggttcaagcgattctcctgcctcagcctccccagtagttgggattacaggcacgcattaccatgcccagctaattttgtatttttagtagagacgaggtttctccatgttggtcaggctgttctcaaacccccaacctcaggtgatcacccacctcagcctcccaaagtgctgggattacaggtgtgagccaccgcatccggcttaaaagacttttgacaaacacagcaggctcttgcttttgtcttttttatccctcaggctctactttccaggggtagctactacctcagctaggtctgtttattttttcttcctctttttttactttcgtcattctaaatcaatgtagaataagtctttgactttctagtatcataactgagctctttctcatttctctcttaaatcctccaatgtagttacgtaacttttttgtaaaaatagcagtatttacattattgtgtacacaggtattgctaaatagtgacttatgattttttttatacatttttgtttttcccacagcaaataattgcattttatcaaaattgcgttttgattcgttacctatttatctttggctgtgttccctcaactactccaagaagtatgttaaatgccttttgattttttttttttccaggtagcacattaaatcatctatcagtgccacttggtttcctcttagagacttcttggtctggagcattccatcctcttgctccaatctagatagtacgattattttttctgggacttcctgttacttctttcctgtcttggaacctctgttttttagatctcctgtcttcctttttcttggtttgcttcattttgctactatgtatgtatcctcagtagcttcttaggaaggaatgatgggagataaattacttgaggccttgaatgtctgaatgtatctatcctgtcctcatactttatagatggtttggctgaatttaaaatattaagtagaaatacattttttcataattttgatggcatattcacagttttctgtcttaagggtttttgatgaaaagtccaaagccattctgatgcctctttttttctgtttttttgaagctcaggttctttttctctggcattctgaagttttataagtttttgtgtggttggttggttggttctttccttcctttcttccttttctttcttgtattaccttagtgggtcctttcaatctagagactctttttagttttcagaaatgctttttttttttttaataattcccaccctttattttctctctctctgtgtgtgtgtgtgtgtgtgtgtgtgtgtgtgtgtgtgtgtatttctttctgagatgtctgttggtttggttgttgaacccactacaaatgatctttaaattttcttaactaatctcatgtcttacgtatttctttgtactggaaggagtgggagggggggaatggttctcaattttaatgatcatgtttttaaattttagaatctttttctgtttccatttcattgcatcttattttatggatgtattatctttacttatctctgatgtgtgtatttttattttttctttgtgtttaatatatttttaatatttcttctgtttcctccagtgtggttattcatttcagggatcttttctttgtttgtttaagtcataaatatctggtgatccttgactgtctataatgaagaaaaagatcctgaggagctgattgcagaggagagaacatgtgtgtattggtggtctagtgacttgtgagttcaggtggacttttcattgggagtctgccccgaatatcaacacctttacatctcgtttggggccagtgttcacaatgaagaaatcatcatctcctgcctctggtatgcttggtgatatgccagctgccagggtttgggttacctggctgagggagggatggaggctgtagccttcgacttctggctacagttctcctgtcactgtgattcagtttcttcagaaaaaactttgggtttcctgctggaactggggatccaaaagctttgaacacctctttcggtggctccccccttgtctaggctaagcctcacatcagcctttggcatctccttggtgcctcaagacctgagcctcttggaggtcctgaggggcagtgaccattccttcaagtactttgccatcttgcaaaagtttgtttaaaaaagcatgttgtctttccttttctgtttgtccttatggtttgatgtctttgtgattttttttttttaaactatcattttagaggaattttggaaggaaatggaggtaagggattatggtcattccacaatgtgtaaatggcagttagggtttgggtttaactattgaagatgacgtgtggcagtctttttatatgaacaatattacgagtagttaatggtggttgtagtagtagttgacacttttaaaagtgctgtcttttgtctgtgtggggcatagaggtcatccctgtgttatgtactgtcatttccattttatagatgagtgttagtctgctcaggctgctgtaacaaagtaccataaattgggtggattgtaaacaacagagatttatttctcacagttttggaggctgggaagtccaggatcaaggctttggtagatttgatatctgctgagagccctcttcctggtttatggatactgctttctccctgtgttctcacatggtggaaggggcaaacgagctcccctgggtctttttataagggctctaatcccattcatgaggactgctcttatgagctaatcacctcccaaagggccctacctgctaataccatcccttagtggttaggatttcaacatagaaattttggggtgacacagagaaatgagaaaacaataatcttagagtaggtatgtattaatgactagcctggttttttggtagtagtagggcacacggtcctgatggaagtgtataagttctgaaacaccgaaagcttcagaagcttttaaactctggttggccttcctgtgttcctgggccctggttcatcgcttgcatttacaagcctgttacttgcataacaggctgcaatgtaggcattcatttctgcattttactgatgaggaccctgattcagggccttttggacagtgagtagaaggccaggtcttgactcagtcctgcctgagacctgaattcatactgtctctttatcagctctggaggagtgcaattaaccaaaaactcaaagagtagaaccgcaagcctcctgccacaggtgcttgtttgtggtctttattattatgctaattattcttgcatcctcccatgttctttaattgataattttcattgtactgagctctgtggaattccggagcctgtgaaggtggcatatggctgggcagtgccagaagcttgggaagaacatgctggtgggtgggtggggaatggtataaactggttatgccaacagtggtggtggtgataggggtcagggggacttttgggaagaggccccatctcccaccagttagaaattaactttggataacttgcttctcctcttaaaataaatatcttctggaaaagtcaagaatgttcacattttatttaaaatcaagtcaatactagttgaaatcactgtgtcccaaatcagtccagaaaatttttttgaagctaaaccaagtaccatatattgtggtagaaaatgacaattcaaaattattacactcctttccctgaagatctcagaattttgtaggggagacttgcatttatgactgtaacagagataagagttatattgctggttgacataagttattgtaggagcacttacttttgactgtggaaagggcggaggggagacaggcttagagagtttaggaaacttgtcccagggaaaaaaaagacatttgagcctcatcttgaaggatgaatttgataggcagaaaagagcagttcataccaggctgagaaagtagtgtgaacaaagacatagagggtggaagcagctgtgtgaaattgtggggtaggaaaaatctaatgtggctgaggtgaaaaattagcaaagccatggagcgccacaggataaagctggaaggtaggctgaggttagagtaggaatttgaactcttacaggtgaattcttcagtgagctgctaaagaatgcagactaggagagtgcgcagtcaggtctgggttatagggaagataactttggccccagtgaaaaggatggctttggagaatgaaatgctggatctgggaaatgagatagagccaaccttgtgatgataagagggatcaactaaggcagttgaaggggtgggatggatttgtgaggaatttggtgagtttggagaagacttagtagaagagactttagggctaaagaaaggggaggagtcacagaggaatctagggtttcagatttgggcaactgaaccaaaggaccctttccttttgggagaagtggttggtcaagggaaagaaaaaggagatgaaccatgtattcctctcctcccagcacccctctctcctaaatctcagagcccatgcttggtggggaggaggggtggagggttgaaggtgtcctctgcccatgagtctggcataacctgccagagggcccagatcctgggtgggtttttgggaggttagcactctgcagcaaatccttaaccctaggcgttttggtggagttggtatttatttgaatccatgtgttcttcattgggagacaggcagagacattgtgcaattgtgggtttgagggttgttttttttcctcatgctacacatgtgagagaactctatccaattatggctaaacctgtcccctgtgagtcacatcctgagttgactggtcaattccaaaggtgctgcctaaaatgctgtttggattttaagaatcacttttgggacaaatcaaacatgtgagtatttattcaggcacctgagttgagaagttccatagcattacttttggtgttttgatgcagttacgccaatgttctgaaaaatcttgccagctacacatcctaaagcaaaacaaaaacttgtacatgaaacagaaccattagctactctaaaattatgtcacacttaaaggtatacatttttgtgcgttgttgatgtaaatcaagtgcaatattttctaataaaaattttattaaacagcattcatttgtgaaggtcctcttaaaatgtgccaaaataaacgtgtgtgtattgctcagttacataataaacagttgttgaatgattctttttgtgtgttcagcagtgataatgctgagtggatttcataggtctcattcttatcttttttttttttttgagacggagttttgctcttgtcacccaggctggagtgtaatggcatgatctcggctcactgcaacctctgcctcctgggttcaagcaattctcctgcctcagcctcctgagtagctgggatcacaggcgtccaccaccattcccagctaatttttgtatttttggtagagatgggatttcagcatgttggccagtccaatcttgaactcctgacctcaggtgatccacccaccttggcctcctttcaaagtgctgggattacaggcgtgagccaccttgcccggcctcattctcattcttatataaattttaagctggaatagacagcacacaagtctctagttagggatcacctgtaatttagggaggaggaggaagagcgtatcttgctgtatgccaggtactttacatatgttctcttttatcaaccataggaagtcggtggcattgactgttttttgtttgtttgtttttaaacagataaagctgagatgctgaggttgtgggcaattaacagaatttgctgtaggtcacagagatgtgtggggctatgtgactccaaagtgcgtgctttctctactgtgctgcctttgaaggttgacagttgacttagtctttaaccaaaatcatctgagaagctttaacaaactacagattccttgacctaccctgagcaatttgttgaattgatctgagatggggctcaggtaaattaacgttttgaatgccatgtttaattaattacaggaggtacaggttttccacatttgaacgtctctgaaatcagaaccatgttataatcagtggggagagtcatcagttaatagcttttttctttcttagtggcacaaaaaataaggatgtactttagattaaatgaaatatgatattataaaaaggtgatactgtaaagggaacttaaatacatagtttgtcacctttctttttttttttttgagatagagtcttgctctttctctcaggctggagtacagtggtgcaatctcagctcactgcagtctctgtctcccagcttcaagcgattgtcgtgcctaaggctcctgagtagcttgggactacaggcgtgcaccaccacgcgtggctaatttttgtatctttttttttttttttttggtagagatggcgtttcaccatgttggccagactggtctcgaactcctgacttcaagtgatttccctcccccaccaaccctgtctgggcttcccaaagtgctgggattacaggtgtgagccaccataccaggcctccaccttttttatgtgcatatgcatgtgtttgtcacaactttcagaattgtaaaattcactggtggtatttattatttgcttacagcaatagctgtgtagtaatgcccttgcagggaaatcataaaatgaatgagatattgtcattagattaagagcaatagcaaggttacttttcagccaagaagctgcaggcaaggagaaatgtcagtggttctcagcctttttttgtgaaagccttaggccctttccctagaaaaaggcatgaatgtccacacatactaaaatttgtatactgtgctaggacctctagacttttggggcctttgagggactcctgatgaaaagcttaatgggtacacctgagtgtcacaaaaactggtatatgtcatattctgttttacatcctaagatctgacctcctacatgaatttttttgaaaatttgcatatattaagattcactctgttgaaaagttatgtaggtttcgacaaatgcatagtgtcctatatccactacagtatcatagacagtagtttgcacctttaaaaagtcccctgtgaatggggcatttgtatttataaatactccctcccttatattttaaataaggtgctttaaaaatgtatttattatggaacatttcaaaaattcaaaataaggcataataatataatgaatctctgtatacccgtcatccagcttcagcagttctcaactcatagccaattctgtttcatctctaccaccttacccctactccactcatttgccctcactctccttatcctctacttagattattttgaagcaaatctagacataatttcataaaaatattccaatatgtatatctgaaagaaattcttaaaaaatctaaaataaccattattgcacattattaagaaattaagaatttataaatatcaaatatctaagctgttgagcttttcctgatttataaatatgtaaatgtatatgtagagactcttcttgcctacgacctggatccactcttatccctgcccctccctgcaccactcagttcccttggtgccagactccttctcaccctggagtctacattagatggcacctctgccttgcgttctttccccaaatctttacatggctggtactttctagatctcaacttaaaatgtcaattccccagagaggctcatcttcctagggttgatccccagtgcctctctgtgctatcacactgttttaagcatctgatacttttttggttgtttccatctcctttagtgaaagttctgtttgaatagacactttttaggttgttccactttctatttttagcacctaaaacagtatctgacatgtagtaggttttcattaaaagtggaacaaatgagtaaacaagtgaatcatacttacaaaaaaattcactatcctgtgccttactggagtcatcattctgttgatcatttcccatggcctgcttagttattatccaaaagggaaattagactgaagctatacttactaatggaagtttacatatgttaattttttatagctgcttttcttttcttttttttccccctttttgagacagggtctctctttgttgcccaggctggagtgtagtgatgcagttacggctcactgcagctttgatctcccagactcaagtgatccttctgtctcagcctctaaatagctgggactacaggtgtgagctaccataccccactaatataaaaatttttttttgtatagatgaggtctccctgtgctgcccaggatggtctgaaacttctgggctcaagggatcctcccaccttggcctcccaaagtgctgggtttacaggtgtgagccactatgcctggtcttgataacttattttctttggagttgcctaatttgcctctcccattcccttgctgtctctgggtaaggcgcctcccatgtcgacttccatagctccataccctgcataagcagacctgtatcactgcacccatcatattttgtctctcccctactgcaccgaggctaccttatggcttggcacagagcagtctctcaatagactgttggcccacgctacaattggaggatgtgaagtattcaagagagattccggcaaaagcctttatcagtaatgaaaagctaggaaatacaatttctaattttttttccccaaaatgcataacctgctgtcctatccagtctattttccatcttatatacagtatagttttcagccctagcaatttgacttgggtctttttgtattttccatgattctacttaactttttgaccatgtggagtacaggtataatagttgtttcagtgtccttgcttgtattctaacatttgtgcctgttctgtgttgattttgacgacatatcatgtttacttcctgaagtggcacagttaggaaaagttagtgcctgcagattcctggcttttccttgggaggaacaggagattcccttccatgtcttcttgaagctgatttctaaaccacctatcaggaccaaaagggtaggcttacctgcttttctttaggcagaaagaaggcagtctgaaggacggaggggaagaaggggtatatttatgttgtctgctgttgttggtcatgcatacgttctttctctggaaagctctctctaatcctcctttctgtgtatgaacatacactctcaagacagttctatcaagacacttagggttgcaggacaaatatatgaggaaatgctgaagaatgtggcagagaattacacgaaaaatcatatttaatccacagattattgcttgaacagctatgggattgaagatttacatgcttattcaactatggggaaaggatgcccctgttctacagtctaatattttaattccttgtcttataatgtagttaaacattaggtctcagctaattttctaggcataatatgaccacagctagatttattacattctgatgaacaaactgttattttatcgatttcagcttgttactttccataacctaagagcatttgaaataagagctccttgtttactttccttttagcattcattaaaatgtattcagtggtttaatacatgttaagtgatattggttttttctctgattaatggctcatattaccactgtcctcagaatctagaagattatcttgactaaatgaatttttacttaaggtttaaatggcatatggaaactgtggatgatataataaaataatagtgttttggctgacactaggaaaccatggatgatatcatagagtaatagaattttgcggctgaggagagggacattaacatcatctggtttaacttttttgttttgtagttgagaaaattgttgtctagagagggcggttaagtaattggttgccaaaggtcattcagctacctactggtgaagccaggggaagggaagtaagaactgtgaactctgctttagttctctttctatgacatcacttttgtttttttgccttaactaatggttcttgacattttctttaaagtatcattttctttaaaacccattttctttaaaacccatctttgatgtagttgacttttatcgacagccagccattcatgcatctaatatttaagtagttacaagtaaactaagaccccagccttgtttgtgagatgtgcaaggtaataggaagatggacatttgaaacaactccctgaaatatgttttgttaagtgctataaaggtggcttttaaaataaagagagatggtttgctgatttagcacgaatgaaccatatgtacagctttgagaaaccaatagtcaacttttaaaatcatttggaaaaaatttttgaactgttgaattattagaacttgagttaggccagttcatgtggatcacagaccttgaaataaatttgaacttaaaatcgtctagggaaaaatgaattttttttgataagccttaagagttttgcaagaataactttggttttttagctttgaatttgagttgtttaaaaataaaattttgaaaaaatgccatgctttctaacaagagagcaacatttttcctttgctggaattggcaatgggaaatttaagtctggttaatgtaactgaacagctgaagtattttcatcctaaatcagaatttaaaaattctgtgcattctaatgacaaaatgctacctctttagttcgtggctgtccattcttgttcttgtctgctttccagcacagcccccttgtctcttggcatccttgtcaaaaattaatcagcccaaaatatgtaactttctttctggactctcagttctcttctgttggtctacatgtctgtcatgccagtactacactgttttgattaaagtagcttcgtggtgatctttgaaaccaggaagtgtgagtcctccaactatgttctttttaaaaattgttttggctattttggcctgctcacaatttcatattaatttgaggatctgcttttactcttgtgcaaaaatgggagtcagaagtttgatagggattttagtgaatctgtagctcacttgggtagtattgttatattaacagtgttaagtcttccagtccatgaacatgggtgtttttccatttatttaggtctttaattctttcagcaatgtttgtagttttcagtgtacagttattcctaagtattttattcttttggatgctattgtaaatggaattgttttctaatttcctttttggattgttcattgagggaccagctcttattatgcattatacctctcctttcctacttggattgttttgcccactacagtgtctcagcattctcttttcttttgatttctatgatctttacttacataacctttgactcattaggattgttggagtcaccagacctctacaaaatgatactcagtgactttatttccctgactctaattttcatttattccctccctttatcccaaagggatattagaacctaccctgattttttttttcctttgaccatgcgggtgtcccagttcccagttttcttttttttcccaaataaggcactcattggaatgaccaccttagaagtgatctgtctcagcccttggaatttcctaactatagcacacctaccttccttctcagtcactcccttctattggaaccaggctctgtttcctagtctcataaagagttaccctgctcctggcttgccacagaactggttccttaaagcattactgaatagattgtttccctcactgcctctctaatcatttctcactactcacttaacctctgtgatgcttaacactccctgacagtaataacccctgctgtccactgtccctgctttcagactgcatttgattgctgttgtcgtatttgaaacactaataattaatagtaattagaaacaactaggttatctagcccctgtctttatgtgtcttttgcttttctcttttaatttttttcaagcgtatgatggggaaggaaagaaaaaggagttaaaattgagagataaagtatgatattctctatagatttcatctttttctaaaagtaaatttgtttaaaattcttttatttcattaattttatttcctgattattagggtaaaatatactcatttatagactatttggaaaatatacaagaaaagatatagactggaaaatatacaggaaaagatatagactagaaaatatactcattatagactatttggaaaatatttgtaaagaagaaaaatgccatatattaaccatgcattgacaatttttgatgaatgtattttcaattttttttcatgttcttgttttttctttatgtagttgaaaccatttgtgatggttaagaatataggtaactctttgagatagatggtacttaaaaatgtgtatgttcagttttgcctcactccctgccttcttaccattgcccggtggtcatattgtggcctatacattttttcctttaagaaattgattatgcttttccttatagctgatcacattttgtaaatatcttacagatgatttgaagtaagtcacatttcctatagagtaccatcttgatagatgtattaattatggctgtacctataaactatatcttttatatgctaatatcagtcatagactgatagttttgtaccatggtcatacttatatttggttctcttcatatttctactattttggtttttaaaattctttatagtttgatacagaacagtgatgattcatgattattataccttcatcctgaagcatagctcttctcagtataaaacagttctctatcccctattaaaaacaaaagttttattaatctctcagtatgttttagagaaactttttgggaagaatacataattgcggtgtttcctgaggccttctgagtactatttttgcatatgatgagagtttgtctagaaatagaattccttgcctgcttcctcttctcctgaaaattaaagctttgttccattccctgtcatcttcagggttttccatgttattctcattcagatagcatgggtaacccaataattttatttcagtcccattgtcaaatgttgcatgtggaaattttttccaagttttggtcttctcttttggtctttctcttcagtttatagtactttgccaaattttgctctttggtttaactgggtattttaagggaaagttggaggaaagtgttttaatcattaataatttatcattactggtgttaacattaatataccaaagataatgtcgttacaaatgtgattttctaaattgaattttatttttgagggccttttctgtatctcttatcaaccttcatgggttattttagacagtagttggttgtatttttgtattaatgagttgtcgcagctgtatgcatatttctttaaacatgtttttgaacacttttattgtttttccagcttaactttcatagaaaatttaagagaagaaaaagaataaaagcatataataaaaatcatccataatccactatttatattcaaccactgttaacatattttgctattttccctttttttaaagtggaacacaacatgcatatgaatatatatttaactttgattcaccggatgtttattgaatacctgttacatgcatgaactattctaggtgccagacattgttagaaatttgctgtatacagtttgtatgttgtaatttgcatttactgttatattctaagcaaaactcattttactacagtatttataacagttttgttcatggcttcatagtcttttttcagtgttttttagtcacttatttggtcattaaaacctgtcttcaaagaagcctaatatgttagagagatgaacagggagcagtttagttgagaggatatcatgacttgaggtatcacctctctcctccaaagaaagataaactgttgaaaactgttgttctatcttctggatgtattacagtttattaattattgctctgttgctggtagtttatattgttacttttcttcagttttaatttttattaatatatttgtacataaaaatttgtgtctgtctttcgtttccttaagatggattttagtaatggaattattgggtcaaagagtataaatatttataaaactttgtatagagtcacaaattacgtgtcataacctgtgtaacagtcagtattatttttaaataatataaacatttctgttataacatcaaatgtattccataaaaacccttcaagtttacctattcactaaaaataacaggatttatgagaaaaataaggttaagggccagccactcaagatttctgcaattaaagcagagcaccaacaaaagcataattggtaccttgtgagatcacttgggcagcccagtcaaaccatttagcatggcttatgttgcctcagaagagagtgagagatattaacatatagggtgtggtcttgagacagtacagatgaaagtcattttcttagccaatgtggttgccataaaggtgggcaccagagtaagtgcagcttgctgtgcaaaggatgggaatgctcctttgagcagggagtcctgggtacaggtgctcattttaaatattcttgaaatagagctgagaggactcctgcttggcagcagctgagctaaatgaggatctttttctttctcactgaaagttataattctattcctgctattccagatccccttgcctaggaaaattaatatgtgaacccacttgttatactggaatgatcttacttaccacttaaaagctgtgttacagaaacatgtctcacaatataacagactgtatttgctaatttgatgcgtgaaaatttgaacagaattttattggtttctttcaagccttttcaaactggaaataactaccttagctaataaagaatggagtatctgtttcaaaacaagtgttttcaaaacctatagtcagaaaacagcaactgtgtttaatgattatattgcaatttaaacacctcagtctatggtagtgaattttaaatttacaatttattttggtggtcattaggtgttcataggcatttggatcacagggctttaaattgtcagcagcttataaatatttatttgttgagggtacaagcatcatcttgtagtgagtcatttgtggcaatggcttaatccaggattatgcagcattcaattatagcaccagagaggacaggaagtagaggagtgagttcaagattgggtgtttttttctgagctgatggtgtatgtctgatgtaggctgtggtgggtgaaagtggaaacctccactggtaagaaagtaattgaagtaattgaggttgaggcctgtaagaagaaactgaggaaatgattggtacaatagaatgggagaaacaagaggattatagatactggagacagaatgaccctgggagcagctgttgttaattgtaaagagctgaagaactactagctgttgagatactatagttcaagattttagaggcagagtaattcgcatattgctgctgtccatgagaaatgagtttctttggtatggatgaagattgttggagttgaggaataaaagagacattgaagggcagattgaaagtgggttagtctcagggacattgggagtctgccctaatgagacatagaagaggggtgcatagaacttgtataaactggtcccagaatcctcagtgaatgaggtaactgagatactgagaaggatagagggtggcatagtttgatggcatgattgtaaagaaacagaactttgggtaagggtgctcaagcagtcatctgaagtggccatggcgatccagggcagtgtccactgagggtaagagaatgggccctttgggctccacagggccaggggaaagttgtacttccgaaggataaggaggttggtggaagtcagaggggtattagtgggtgacagtatagaagtagatcattgaagggggataaggggtggacggccagggtgctaagctactagcacaagttgaagtccaactaggttttagaagcctgagaaagttggctgactgcagtctttgccctgtcttcagttgaaatgttgtgaagttgctctgttatgttcaaaaagaatattccctacttaggaggcatggtttctgttgaagttggtagtttctgtttgggctggtaaaactagagagaccttgagcaatttggggagaacagatgttcccaggaggctgggaaggaattggctatatccacccgtctccttgacagataagataaaatttctagtagaacaaaaccacgaattatcaaatgactgcatgtatgacttgaggacgtgcctgcattttcttcttttttttttttttttggtcttgtctggctgcttacaggtactttttatctagcttaacatggagttgaatttacagaactcctagatgctcttgatactttgaactgtgtctggaaaacttacttacatattattttttgttattattaccagtaataacaataaattgttattaggaacagagttctttattttcctgggaaaggtgttttgaagtttaaatatggaagttggtgatcacttaagattaattttttctaaaactttttatgttagtacaaatactatgctatgattttgcaagcttcttgagataagcagagaggtaaaaaccattgagtgttaattccttttttccatcttttaaaaaaattagttaaactacgtataatgaaatacacagattttaaatgttctcttggttgagttttgaaaaatgcatacacctatgtaaccaccactccaaccaagatataggacatttccatcaccccagaaattccctgatgcctctttgtaataaattcaacagtttcccttccactcccctttccagggtcaccactgacctgatttctatcaccataaattacttttgcctattctataactttatataagtggaaatattagtatatactctcttgtgtagtttctttcactcatacagtctatgaaattcatccctattgttacaaagtctcttattttcattgctgattagcattccatttatatatatgccacagttggttatccgttcatctgttgatggacatttgtgttgtttccagttttggctattgtggataaaagggctgtgaacatggccaggcatggtggctcacgcttgtaatcccagtactttgggaggccgaggcggatggatcacttgaggtcaggagaccagtctggccaacatagtgaaaccgcgtttctactaaaaatacaaaaattagccgggcgtggtggcaggtgcccataatcccagctacttaggaggctgaagcaggagaatcgcttgtacctgggaggcagaggttgcagtgagctgagatcctgcctgggcaacatagtgagactctgtctcaaaaataaaaacgttcgggggagggatatgaatatttgtgcataagtctttttgtggacatatgttttcttttcttttggataattactcagaaatggaattcttggatcatagaataggtgtatgtttaactttataagaaactgtgttttccaaagtagttgaacattttttacactcttagcaatgtgtaagagttgtataatagttactccacctccttgccaacgttcaatgttattctcttgggtgctaatggctctcactgtggtgttcatttgtagttctctgatgactaaggatgtttagcacctcttcatatgcttattgggtatgtatataattatgaaatgtctgctgacatcttttgtccattttatttaatttggttaaaaaatttttggttctttatatattctagaaacaaatcattaaaaaaaattaaccaacatctctcccttcccccagctaagttctttcttagatagatgtgactgttttctcctagtttgtgactttaatttcattttcttaatgttttttgagggacagaagtttttaattttgatgaacttcagtttttaattttgatgatttttaaattttgataaggttttaaatttttgataattttcagttttttctggttgctttatgttctgtgtcacctgtccaggaaatctttgcttaccccaggttgtgaagattttctatcctacgttttttttttttttttttccagcccaaaggagagcaagggagagagggaaggagagacagaaggggttgggggaaagagaaagagagagagagagagagagagaaggcagtagagagagtgcgaggcggagggggaagaagaaaaagagagagggcgagggagccagagagcaagagcgacagagccccagagagggagcgctccgctctggcagacagggcctcttctatcctacgttttcttttagaagctttatagttttggcttttacatttaggtttatatctcagattgggttttgtttgatatgtaagataggggtcaaggtttatttatttttttacttgtaaccctaggaagagttttttaaacatttattttttaaatttttatttattttttatttacacattattattgtacatatttatagagtacagtttggtgttttgatacatatctctgctgtataatgatccagtcagggtagtgtattcatcacgtgatacatttatcatttctttgtgataataaccttgaaaagcctctcttctagctattttgtgatatacagtgttttactgttaactagtgactctactgtgtgttagaacatcagaatttattcctcttatctaactgtaagtttgtacccactgactaacctttccccatcctccactttcccctccccgcctcagtctctagtaataattgctgtgctctattcctatgatatcaactttttttttcttttttttaaagattccacatatgagtgatgtcatgcggtatttgtctttctgtgtctggcttatttcacttaacatgatgtcttccaggttcattcatgttgtagcaaatgacagaatgtccatttttttaaaagttgaataatactacattgtgtacatttaccatattttctttatgcattcattccttgttggacagttaggttgatctcatatcttggctattgtaaatagtgctacagtaaacatgggaatgcagatacctcttcgacatactaatttcattttctttggatatatacccagtagtgcgattgctgggtcatatggtagttatttttttttccccctacacacagagtcttgttctatcttccaggctggagtgcagtgacacgatcatagctcactgccgcctcgaactcctgggctcaagccagcctcccatctcagccacccaagtagtgaggactacaggcatacaccaccatgcttggctaattgtaaacattttttgtagagatagtgtcttgctaatgttgcccagactggtctcatacttctgggcctaagtgatcctctggtcccggcctcccacacactgggattattggcatgagccactgtacctggccttaacttttaattttttaaagaacctccaaagtcaggccaggcacggtggctcacgcctgtaatcccaacagtttgggaggccgaggcaggcggatcacgaggtcaggagatcgagactatcctggctaacatggtgaaaccctgtctctactaaaaatacaaaaacaaaattagctgggcatggtggcaggcacctgtagtcccagctacttgggaggctgaggcgggagaatggcgtgaacccgggaggcagagcttgcagtgagctgagattgcgccactgcactccagcctcggcgacagagcaagactcatcttaaaaaaaaataaaaaaagaacctccaaagtctttttcataatggtgtactagtttataatcctaccagcagtataatagctgtcctaacaggaatgaggtggtatctcattgtggttttaattttcattttaaggttttttttttctctgtatatttatgcatctagttgctttacatcgcttgttgaaaatactaaagttgaattgccttgttcctcttccaaggcattttcattttcaagatcgttgttggcatgtaaatttcacgattaatttattttttcaaaaaaatctattgagattttgattaagattactttgaatctgcagatcaatatgagagacttgacatgttaacagtattcaggcttatctaaggagaatggtacagtatgtctctccactttttaaggtcttctctaatttttcttagccatgttttatagttttcagtgtagagatcttacatagctttagagttattcctaggtccctggtgttttttaatgttatagtattgattttttaagttttattttctagttgttgctaatatagaaatacaattgatgttaaagtattggctttgtattctgagaccttgctaaattcactagttggttttagtagtattttagtagatttcacagtgttttctatacatatgattatgtcatctgtgaacaatgacagttttacttcatccttgtgctttttatgtcttaatacattggctaggacctccggtacaaggttgaatggaagttgtggaagtggacatctttgccttgtttctgatcttaggaataaggatttaataatttaccattgagtatgatattagctgtagggtttttttaatgttctttaccaaactaagaaagtttctgtctattcctagtttgttgacagtttttatcattaataggttttgaattttgtcaaatgctttttctgtatcgagatgatacgggtttttattttgttaatatggtaaattatactgatttttaaaaggttaacctttcatatatagttggtcatgatgtgttaatccttttatgtattcttgtattgaatttgctaatattttgtggagaatgaatctatgttcataagggatgttgttctgtaattttcttttctcattatgttttagtaagttttttgtatcaatatgatgctgctggcctcatcagatgagttaggaagtattctcttcaactattttctgatagagtttatgtaagattggtgttgtgtcttccctaaatgtttgatagaattcactaatgaagccatttggacctggagctttcttttgggataggtttttaattgaaatttttatttcttttagtttggtaaattatgtttttaaagggtgcttctgtttcatctaatttgttgattttattgtcaaagttgtttataataatctttttatctttttaacatctataggatttgtagtaatgtttcattttcattcctagtattggtaatttgtgtttggtgttttttctcttttttccttgatcagccttgtgaagggtttaactgttttattaatcttttcaaataatactcttttggcttcatccttatagttaatatctttatcatatggtatttgatcagggaaggtagcctgtatgattttggtttgaatctgtttttatattttaaaaaaattttaaatgcatgtggtctaattcatgattaatcccccctcactttttcatgtcccataattatatgttcaaatcatctatgtccacactcaatttggtgacctttgatcttttttttttttgatctttttattttttaaagagagagggtcttgtgttacatagacgggagtacagtggtgtgatcatagctcatggtaacctcaaattcctgagctcaagccatcctcatgcctcatcctcctgagtagttagtactacaggtgtgtaccaccactcccagctaatttaaaaaaagttttttatagagatgggttgttgctgtgttgcccaggctggtcttgaactcctagcctcaatggatcctctcgtttcagcctcccaaagagctgggattacaggtgtaacaccatgcccaactgttttgatcttttgatttctgagaggatgttagtttccaattgtgattgtggatttgtgtgtttctttttgcctttttgtccgttggtttttgctttctatatttgaagcccttttttttttcagttgtactactgtatcttcttgtgttttttattaatatgaactcattagtaaattttatattaatacatttagtatgaaatcctttcaacttgagtcctagtttgtctcatgtcagtactgcctcatgtaattttcttctttttatttatctgacatatatttctaagtaaacagcacctatctagactagactaagacccagacgtaagaaaaaaggcaaatttaaattatttacaatttttcctctaacccctttctccagcaccaccaatcctccattcctggatatttgctaacactcctgccagcagggagaggcttttgcagaagggtctgcatttctgtctctgctttcagtatcttttttaggataaataaaagcagtgctacccagctagtgctgtggatggcaagccacccaggtgccggggcaagagactgaaggcacaagctgttccagtataataaagaaaatatatagaacaagaatagttatactagaaatagaatatagatatgattatatatgaatatgattaatcattagtttgtagcattactctttattccaatattataataatctctgttctacaattacaacctagaaaaaaccaggccatacagagataggagctgaagggacatggtgagaagtgaccagaagacaagagtgtgagccctctgtcaagcccggatagggccactagagggctccttggtctagcggtaacgccagtgcctgggaaggcacccgttacttagcagaccttggtctagtggtagcgccagtgcctgggaaggcacctgttacttagcagaccaggaaagggactctccctttccccgggggagttagagaagactctgctccaccacctcttgtggaaggcctgacatgagtcaggcccgcccgcagccatctggaggcctaaacgtctccctgcgatgctatgctttagcaatcacgttcctggtccactttcatgttccatcctgtacacctggctctgccttctaggtagcagtagcagaattaaagtattaaaatctttgatctctccgagaaatgcatagaagaaataatgacataagctgccccctctctctctccacctcagctaccaaatagggaagggctggccccctgtccgtcggacacgtgacttatgtgaccttacctatcattggagatgactcacactccttaccctgcccccttgccttgtatacaataaataacagcacagccaggcattcagggccactaccggtctccacatcttggtggtagtggtcccccaggcccagctgccttttttctatttctttgtcttttgtctttatttctacgatctctgggctccgcacacaaggagaaaaacccacaggccctgtagggttggaccctacaagttcagcagctttcccctatgtggcgtgccttaaatttcatttctgcattaatgattttattacacctagttcagaaacgagaaaactaattttacaggataaatacctgtaggagagtgatttgtttctaggtctatattcttaggaggtatgagatctccatcttgacctctctgcatactgtgaggtttcagaccccatagtgccggctcagtaaatgtgaaatttgcattttggctgttctcctcagtatctttccccctctaacttgtggaatatatatgtcatgtattactagagggacacctggatagaactttaaataacagtaaatcaattcaagagaaagttactccctgctcttagtctttcagttccttggatgatcatggagaaatcctctgtgtgatttttttttttttttttacatttctcaaacacttgattatacctccctcctccctttttataaacaatgagctaggctcaagttcactgccttcttggtaggcaccagaattgagctagaatttagtacatttgtttttcttttgtttttttgataactctttttttaacagtaactgttgatttgccactgaaaagtagtgattaaattttgccttaaaaatttttattttaacaaattaaataagttttaaagaaaaatattaaatacaggcaggataaaagggtgtgacaaaattgagatcctgatacgtatggaagattgtatgtgccctggctgagaaggtggtatgggagtgagtgaaacttcggagtcacttctccggcattccaggcttttcatttatttttgttttgtctatagtactaacctcttggttaacaagcatttatgttttgtgcagagagctgtgtcctgcagataccatgaaaaacatagtgttcttccctttgtagtcttggtagggaagacagcatgtgcctgcaaaacacctggtgcaagtgtgtaccatggtaaatgctatcagaacagcaaggaccttgtgttgtcagaggaggtggaggtcatctctggctggaggcttgaggcttggctcaggcttatgttttatccgaggggcctttctccctttcattttgaatctcccttcctaagtctacgtaaattttttggggaaggggcatttctttgtagctgttcctctaagaagcactgtgtccagaagaaagagcatcacactggccctcagaagacagagtggctcccagagttctatctagttctagcacacctgttttcagctggataactgcttaattgtttcaagtctcaatttcttcatctttcttggtgatgataaaaccccgtgtcttttttgcttcataaggcagcccatgttagggccatttgtgatgttcatttgcttatcaatattatcttcactctatttgtatttgaaatactgatagggatgattttgagaatattttaagtgtttaattatttttttcctatttttttctaggtcttgatgcagaactttattatgtgagaaatgaccttattagtcactacgctctatcctttagtctgttagtacccagtgagacaaatttcctgcacttcacctggcatgcgaagtccaaggtaagagagtggctaaccacagacatcatgacagggtcacccagccacagaggcaagggctgtgtttgaggactgggctgctgtctgtactgaagggtccgctggtgatgtgatataatagtactgagtcttttcagatttatatttcaaatatttggcctattcctctaaaatttcttgaatcctttaaaacgaaggtggctatcatttaattgattagcacatgacacaacacttaacatccttttaggctcttcaaacagagatccagacctagcttgaaaagggtacagttggacccaataatgcctgtgctgctgtggtgaaaggagatgggtgtaggggtggagattggtaagataggctttttagacatgttggacagaatggatacagttctcccactcatggagaaacggtgtaagaaaggtacagcagatgcagcccccatgtgtcctgtggtgaggcttctttacccataagggctaaacccaatcacttaagaatctcttgcctgggctacttgttgctgaattcttcacattgcctctgactgcctgggtccctcaaacatggtaagttttctcctaagtcaaagagtcggaggctgagcatggaggtgcctcctgtacccaaccaacttcagtttcttttatcagctttatataggcttttgaataggattttattcaggaaataaaaatagtcttgctactataaataagaatacctattgtagagtttttaaaaaaagtattatagagtagtgtctgtcataatatttgctccaagttatttaaattggccactttaatatagatttttaaaaatcttcatttttttctacttagaaaacaacagtgattattgggaaaatttaaatattacagaaatgttttaagaactgtaagactaggcctggcgtggtagctcacacctgtaatcccagcactttgggagattgagacaggtggatcacaaggtcaggagatcgagaccatcttggccaacatggtgaaaccccatctctactaaaaatacgaaaattagcgaggtgtggtggcacacacctgtattcccagctactcaggaggctgaggcaggagaatcacttgaacccgggaggcggaggttgcagtgagccgagatcgcaccactgcactccatcctgggagacagagtgagactctgtctcaaaaaaaaaaaaaaaaaaaaaaaaaagaaaaagaactgttaagactttgtagttctatactcagaagtaattgtttatagtttggtataacttcttcaaagtccccttttttccctttttaaacaaaaaagggatttttagacatgtatgttgaacagtactttttcccctacagaataacttatctaggcatctttctttttctctcactcattctctttagtggttttataatatgagattgtatggatgtatgctatattgctatctgtgaagtacctcgttgatgggacacatggatttttaatagcattttattatttcaaacaatgcttcccttcaccattacacagtttccctcatttcattttataggcaaaatccaggtaatgggatgatgaaaacaattggtagttcatcttttattgatgtttctacctttgctatttcttttatttaaaaatttttcaatctttgcttttgatgaatatagaaacacagaaaaaaatgtgtgttaatgtgtatccctgtgtgtgtatatgtacatatatatgtgtgtgtatgtatataaatatgttaagaacatctttgttcagaagtttttgtgcacttgtggccttatttctgaatagtaaattactgctgagaagtcaagtggctaggccaatgtgtgtgtctttaaaactttgaaagatactgccagatgtaccagtgaataagtgcttatttttgaccttcattttctaataccaacattttaagtatacttgtttgccttccagtctccctctccctccccctccccatacgtcagtgagtattttctaagaaaaagggcattctttatacaaccaaaatacaatgatcaaaaccagaaaatttgacattattatgttattatctaatccacagtagtcacattttatcaattatcacaacaatgttcttcatagctaattttttactagttgatgtctcttagttccctatcagtctggaacagttccgtagcctttctttgtgttttttgaccttaacatttttgaaacttacaggccagtaattttgtagaatgcccctcagtttgtgttgtctgaggtttcttcatgattagattcaggaatatctctttggcagtgataccacaaaggtgctgtccttcccagtgcacaaggtgccaatttgtcccatgactggtggtggtaactccgaacactcttgtcaccagatttctcccctgtcaagttttttactttatatatagttagtaagtaatttgtggggagataatttgaaactatcttttaaaaaaatctcattcctcatcatcctttcaaccactactttttgcatctgtttttggaactagtttcgtatttcagcctgtggtgtggtgagggtagtgtgtttcctctcactggaagaggtcagacctacactggataaccattcaataaggctgttatagaaggaattcaagtatttgtggagtggttgttactgaattttaagttcccttgcaactctgaggtccagtgtttctatgaacatctttcaggcagagaagcttcttatattctccaaaaagttgatagctaattctttgttgttattcttacctttgatgttgatacatataaaaacaaataataaatgtatttcaaaatggtgaaaggtttattagagaattctgttctaggtacttctattgactttgaacagagtgtgaatatttctgggcacacttaggaaaaaagaatgctgatatgagaaggtttcctgggcaagtgtatgggtagtgatttgtgagtacaaaggcaatgtgggaagtggcagtcaggactgaacaaaataaaaccttcttttactgattcctttaaaacagttaaaatacaccgtttgttatttggaatgagctcagggccctgatgttgctggtaatgggtgtctgagtcttaggagcctgttacagggggaagttggagtgggagagagcaggtaggaggggctcgggtgaatatatatgtttgaaggggaagcagtgttagcatggtacattttgggttaggagaagccttggtatagctgtaactgtactcccatatcattcacattattttatagagcataatttctaagttacctctttggcaggtataaatattattagtgcacatttgggctgccactgctggtatgatattctttgtgaggcagaagtttcctgattttttttggagggtatgactattttcatgtctaggccagaaatgtagaagggatcctagtttccttctcctatactttctaaatctagttgattctctctaataattacatcttaaatttgtttcctacctctcttgtgacccaatgcctcacacttagtttgggccttcattgtttcttgctggattcggaagtggtcttctaactggtctcctttcctctggactgacctcttgttgcaccctccacaaagccaccttaggcttctctgttgctactggaataaagctcttgatttcgtaggaggcctttatgatctggtctcggcctttcttttctgcctcctatctagccagtcatttagtgtcatttttgtctgtcttggaatttcatgaatgccctgtgacctgtcacagtgctgctgtttgccacaaatgccgttttttcattctttacctgaataactcctgtttacctcataaagctgtgacctgttgtcacctcttctccagctgtgtcaggtgcccttttctgtctgcacagtgcccttctctctcatagccctagttatactttaagaatattgtaatagttgattttcttttctttctccctcctacttgctgagcaccttaaagggtatcctctgtgcttggtatagcacgtggtactaactgcagaagagatgtgcaggtagaagccacagggcccagctcaacaaatggggagcttctgagcagttagggcttttcagagttgggatgtgcggctttaggagtggtgacttttctatttctggaagtgtgaaaacatataggctgggtacactcgacagtagttgcacaaatgggatttttcagatattttactcataatagagtgaggttataagtttggaaaaatgagtgggttgaatataaacctaaactgatttcacaagttcatctgtaacaggtataaaatttagaggaaagtaaccgtcttacgatgtttttttagtaaaaaactaaggaaatatgtctgtgttaatctagtttcaggcttcagccactattgcagttcccaattctaggtaataatctctggtgattttagcacagttgattacgtttatttattttaaaaattaatcttatgagtagataatatatgcacatagtaaaaatttaaaaagcataaagggtatacagtgaaaaataagtcccttgcaccttctagtaccatccctgagcaatccagccacttagttccccttgcctgagtcagccactgttgcctgattattgtctttcctttggaaatagttcgtgtgtatataagcttccatgcatatatgtatatatacatctttcaacagctaacataccacctacttttctgcagtttgcagagcactgaacaatatcctggtcaaggatctctgtcacttgatacagagttgtactttttcccccttcaaatggctgtattacttattattatatagttgtactttggttattgatcagttcctgtgaggaaattaagacccagatttggaaagggatttgcttaaggtaggagaagtagggttagaggaagcagaaggtagagatgacctgaaatgggaaagtcacacgtgagggcaggggaggcttgatgaagggtttgtcacctgatcatttaaccctgaggtgtaatcatgaactttcagaaggagggccgtggctctcaagctctaatactttatcagaaaccctcggttcttgctttttaaggtttgccagaagatgaaatatttgcttccagagatctgcaggctccctgatatgtgtcggttcaacatcgtagatactttaacattagtttcacatatcacagcttctggtaatactgtttctcagtgttttcgccattttgtcttgccacacagattgtggtctcttcagaggcttgaagctgtcttactcttagcgcataggtcacacatgccttagtgagtggtcaggaaagaccattgtgttaattgcattttgagttgggagtagaactctggtattgcttctttttcacaagaccacacacttaaaagcaggctactgagaggctttaacagatagtttcttctgtattccagaacattccccaatatccaggagaaacatgtaactgtgtctgttaagtgtcagtagctttttttttttttttttttttttttttttgagacagagtctcactctgtcgcccaggctggagtgcagtggcgctttctctgctcactgcaacctccacctcctgggttcacaccattctcctgcctcagcctcctgaatagctgggtcaacaggcgcccgctaccatgcccagctaagttttttgtatttttagtagagacagggtttcactgtgttagccaggatggtctcaatttcctcacatcgtgatccacccgcctcagcctcccaaagtgctggcattacaggcatgagccaccgcgcctggccgtcagtagctattttagatatctgaaaagcgaaaatttgccagaatgtagcagaatattcccactacccacccttaccccatggctgttctgtgctttcaggaattcgtcatcattttctaggagttgcagggaacttgtccagagttccagcaggcactgctggaggccagcagctgtgtcctttgcagagtgaggtttctatgagaaaggcattacttctagtaagttcagagaaattaaaaggctatttggctgtagacaagtgtattcactttaaatctgtactctctgtgttccagaaggaaatggctttacttaccagcttcctatttgtaattgccatttgtttccaagtaagggaacataagcaaaaatgtttatttttcagtttattcaaatgttgatatttttggtaatttgtttctttttttttcctttccttttattttctttttctttttctttttttttttgagactgagtctcactctgtcacccacactggcgtgcagtggtgcgatcttggctcactacatcctccgccccccaggttcaagtgattctcctgccttagcctccgagtagccgagtagcatgtgcccaccaccatgcccacctaatttttgtatttttagtagagacggggttttaccgtgttggccaggctggtcttgaactcctggcctcaagtgatccacctgcattgacctcccagaatgctgggattacaggtgtgagccaccacgcctagcctgtagtttcttttctgaagtattttggctcactctacattctgataaacaactgctgttcaaatttctttgtcccagtagactgtacatttaacttttgagcagatctgtttctttaaaggatgattggcaagtgagagtccttacagatcgatacatgccaaactagagaaaattggacttcaataattggcaatttcttctctaatcccagaaactgcagttttaaaatttatatcttaaagactgcagagggaaaagagaactaccttgtgaatgcctcccatttttagacagttcctcaaaaaaggagccagcaaggaggcttccacagtttcatgcttcatattcctctaagctgctgataggaccaaaggggctgccttctcaaatctcctcctcagccctttgcacctctccctgtgccctcattggccagctacactcacagcctcatttccttcccttctctcctccttttcaccttgccacactgagatgctcaggcgccagtcttagctgcttttttaactgcagttatggccctggacccctttgccaggccctctctgcttactttggggttctggtctctggtctgctccttctctccttgtgataactgagacctagaataaaggagacagcaagtttctggggaaatagtaagtgtggctttgaatttgttaagttggaaggctgtaggataattagatagaattgcctagtaggtaattggacacttgagagggattgaaggtaaaagagagtgagagaaattgacgattaagatatcccatcagtggtgaaatgggctagaaccctagtgtactaggattgaaggatttacatttggagaggaaaatggacctttccttgggactagaatgaaaagaatagatgctctaatagatctgccggggtgttgaaaagaaaggcagaaatggggttcctctgtactagtggaaagggacaaaaacattgagtgtgaggaggtggggaaggcctgtaaggttggaataagacgagggaaaagagggtcagtgaggaagggattgctgagtagaactaagggcctcccctgagactggaggtcattgttgtgtaagagctccttttctgtaggatggatttccttcagcagtgctgagcagcaggagtagagtaagaaggggtggtcaggatgctagagctgccctttgagggtttggaaggagtcaaccagctgaaggtgccaatatgactgtcagtaatgttgccttctttagggcttgggctgtggagaacatgaaactaggtgttcacggctatactggagagaagggaagtggctttaactggctgctgcatcctgctatgaacacagcacctggctcataaatgtgcctcataaatgttggctgacttggagtgatggaatcagagaactagttttgtaggaatcagaggtggtgatgggatctttgatagaatggcatttttgcatttgttttggtagtgaagtaattctttagcgtgtcaggatattgaatactgaatattgaagccagggagaacatggcaggagaccaaggcctctgcaagtcctgtgtggcttattggtgttgatggcatgagaagtagccattatgagtagaagctgtgagcttcggccgggcgcggtggctcacacctgtaatctcagcaatgtgggaggccaagacaggtggatcacttggggccaggagttcgagaccatcctggccaacatggtgaaatctcgtctctactaaaaatacaaaaattagctgggcatagtggcgtgtgcctgtagtcccaccagctactcgggaggctgaggcaggagaatcgcttgaacccaggaggtggaggttgcagcgagccgatatcacgccactgcactccagcctgggtgacagagtgagactcggtctcaaaaaaagaagttataaacttcaaagtagaggggatttgcatgagggcatgaggaagggatgtctgggaaggacctagtgatcctaaagagtgccgaccctactgtctaggccctgagggtcaggtgttgtaggaactgaatgataggaaggggaacagatgacttctgaggaaagccaggttgtgggagaaggtgggaagacatttgtgaagaggcagagagtgtaggaggctgttctgaatagggaggttctcagaatggggaaaaaacagaaggcctgcaacagtgttcttgacagacccaggagggtttgtgtcagaatccctggggccagcagtgggctgatgattatggagaagtgcagcatggcaataaggtagctgttctggaatgactgctgatgctgctgatgtcagaggagacttgtgccaggctaacagtatgtattgcattaatgatcttatttgatcctcataacatgtattacccttattttacaaaatatggaaactcagagaagttacaaatttacctaagagtcacatggtctcatggttccaaacccagttcttgctggcggtgctgatttcttttgtgcacctacccttcatgtatggtcctgttcagagatagcatcggtgtagggatgtataatgcattctttgatgtattgctggagagcttgctcattccctgcccaaacttgcttggctgtggctctctagcaccccctggtggcagcaatggtattgtgatatgctaaggtgaatgtgaacacttcctagccaaggtacctcgaagtcactgatgtgctgcagcaagaacatttcctttgttgggaatgtggcacttatcaaacacagcctttaacagttgtttacgtacctatcttaactgcaaaggaagagtttaatgtttgcatacccctacagtgtttagctaagacactttaaatagagtgtgaaaggagaaaccccaaggggaatcaaattctggactgagcccttcttattcatgggtaacaacgccttccaccttagcccaagcgtaagggccatcccttcccttatatctgggatgatactctttccctcttttctttcatctttattatgtaccatttcgttagcttttttcactagcatatatacatatttgaatatctcatctaaaaacaaagaaaagctttggaacaccccccacttcaccatctgtctcccattcttctagttaagtttcttgaagaatggtttatcgaacatctttcttctcactcttttcccaacctgctgcctcgtggctctgcaaatctcagtctgccaccaatgataccttttgtgaccactgaatgagagagggataccatagttatcaagaacctgtgggcagggcagagagtgatgtgaactgtagggcttcattgaaagtcttgatgctggcagccattctgaatttcagctattgctttgcagtttgagctgcttctttcatgaactctccatagcaacagagccttaattattgatgctgattggttctgttaagccacattgggtaggccaagtattgatagataacattggtgttttagagacatctcatgggttgcctgtcttcccttctggattctgaatcacttaagaagtagatccagaggtcaaatggggatctaaacatgaactttctttttggtgagagcaagactagaggatgtgacttagatattctatgagaaatctaccttggaatctgcttattgtgtgagtgggtctgcagagcagaccttcctccaccagccacaaggaggccctccgagcttggctttcatttatcaaccagagaaggcattggtagctatttatggtctgtcagttacatatctcaccgctttggttcttcatatctggctctccatggcctctctgtcagtgctgcatagttctcagcaggatttctgaccctagatggcaggttttatggaagagtggtggtcctgttgtggacttaaaatagagggtggcttacttggttgaatttttatccaattgaaaattcttaggactgtttctgacaatttgcatttttttatagctagattatttgtacatatgaaaggctcatccattgattaatgagccaattaatgaagtcaagctgatagtatccttcttgttatcacaggtccattttgtttatttttgtctattttacaggttgaatataagctgggattccaagtggacaatgttttggcaatggatatgccccaggtcaacatttctgttcagggggaagttccacgcactttatcaggtaagtaagagtcttcaaagacagagttaacatactttttcaactgcatcccctatggccccaaaacagaagtttactgatgtgtagtgtgtattacttgataggcataagatgtatgagtactgtgaaaagtaatttttgtaaatatttgcactgtgttcttaaaccattctctcttttctgtccttctggaactctctgtgctccgccctccctgtctctttttctgcattgctggtacttacctccacatgagtccctgtgcctgatcttgtttccctttgattaggcaccacatttcaccctgtggcccagatgatctttgcacggtcatgtttgaccctgtgacgtgaagcccatcagtgctctccactcccatcaactgaacattccagactcaccaccttgtgtcctggatcctttaccatctgcccctgcctgcctgtctagccttgttgctgcacttgccccagagttgtagcagttccagactacatgcagttctgatcttcaagcctttgcatgtgctggtctcagtatttgggatcatcttttcctctttctgctcgtgaactcctttctattcatcctactcattctgcaagactcaagatctgcactgtcttttttctgccaccttctcttctttcatttgttaacttctattcttcctaccccttagaaccttatatttaactgtttttgcactgattacatatctagcaattcccttgatgcatagcatagagtatggtgcaggataggcactcagtacagtctgagtaaatgaataagtgtattatttacaccaatttaactgcttttgagctaacttcttaggctcttgaagttgtggtatttgtaagaaatggatatttttaaaaattgaaagtatcagccacaatagtgttgtgaaactttttctggcagtcatattcactgttatcagtgacatacattaagcttaaataaagcacaggagggctgcttaaatttttatgggcagtaaaggaatttagaaatgcccatatctttaatgcagtcatacagatggtagaatgataggttttaaatttgtaggaaaagaatcttaaagattggggaaaaaaattatatgcactgaagtctgttatcccattgttacaattatggattaaaatcaatttctgttgagaaaggtgatagctgacaatttatcagattcatttacaggtttatatttaatctttttattaagagcagacatacttgcattttggtagtgagttgtctttccatttgatcatgtaatttctgttgttactattgctgatgtgtctgttaaggtttgccttatgatccttcagttttagtgtactggaatagcaggacttatgagacaaagtggtgtattaaaaacaatgagcagaagttgaaaacaattatctcttcattgatgtcttggtttgttctttaatactaacttttatatccataatgaattaaatgcttaatgtctagaggtgtggtagtctgaagatctctaaaaacttttgtttagttactttatttaaatgtattacttttagttttcttgcagcaaaaataagtaattctaaaatgtttaaaagaatcattttggggcattaatgttgatttttagaaaatgtaaaatatttttcttatcttttttaaacagtgtttcgggtagagctttcctgtactggcaaagtagattctgaagttatgatactaatgcagctcaacttgacagtaaattcttcaaaaaattttaccgtcttaaattttaaacgaaggaaaatgtgctacaaaagtaaggaatttatttaccaaaatatgttttacatgtatgtgagaaggtgaaaaatagagtttgttgttttttcacagatttaagtatgtccaactcatgattatagttgcaagtgagaaaagagcactggcaggtgaagttttgagataatcccagatggttggtagccaagaatctcactcaggcctcattcagtccatgctttctcaaatcttttgtcagaattgctaagatgttttccattaggaatagtgctaaaatggttgaagaggtaaagaaataagaaaaatctgttgggacttctgagtaactatgttaactgtgtttcccttatcaagttacttttatgcagaagcattgctctcgggtgagatagacctgggttggaatggcagctctgctcttttcaggatattgatacaagttacttaacctctctgaggcttagttttttcatctgtaaaatgggcataatacctgtttcagaggtttgttgttttttacggttcattaaatctagcctaaaacttagaataccgtatgtgggtacttagcaaagttagttctttttggttttgaattatctgttactgaagaaatcgagtggatatgaaagagttccagcatgctaggtcataaatcaaagaattttagagttctccttacaagtttagtccaacccactcactgtaagttccacaaagctacagtgacccaaatttacaaggtcacgtaggtagaattggttagtatctaagatgggggggggaaatatactttaaaaaaacctcgcaaaccctcagtgcttactgtgttctaagtgcttgataggtattacacctgtttaatccctacagcaaccctaggcaatgggttctctcattgtcttcattttcagaaaaggaagctgagcttcagagaatctagcttgtcaagatcagatagctaagtggtgcagctaggatgcagacctgttctctcagcctctttgttaaactttcttttaataaatttcccaattgaaatcagtgctgagtgttatgaaaacacctaaggccaacaagtgagttgaattggctaatgtctgggtacatgccaataaaaaagctgcactacatttgaatagacattttaagaaagaagagttagcatctttcagctttagtgttttggtacaattttcagttctactatattcagttatataccaacttccatgtaatgttaaagacaaaggagatttcagagactctctactccaatgtagtcattatatatttgatataaggagattggacccttggccacctaggctaccacagctagccagtgaggagtgtaaaacattcagttccttatcctcagagagatgggcatgactgtaccatggtgcttcatctgttactcttaagtaaggcagaatgataaccagacatggtgtggcctctggatcccaccagtgctaatatctgctaaggttaatgatcagctgatactcaaaatggtcacatactttctccattttctttaatatgtgtgtgaaattaacattaaaattctgtgttggagtaattttctattctgttttagacttaagtttttctctggccctctgtatttgttggtcatggttttggccaccctagtcatccagttcaggctcatgactcttactttattatgtgatcctaatgtatttatttatctggttttccagcctactatatttcaaaaactgtctgcaacagaaaacatctgtactatatggaatgttagtaggtgttactagcaagaaaagtttcttttatcatatgaggatgggaattatgggttagacaagttttgtgaccccataactcctttcagtctttatattctaatgttcactgtgaagctccaaagagacactatagtatgtggcttttcccaaacttcttgatcataggaacattttcactgagcatctagaagtaacaccctttggctaacagtggtatagactattgattggtgactgtagtggtgattatcagaatagtaacatagctttcattatctcgcaacacatacctgttgctgagttccagcaatgttctgataattatagtaattaaggattttcatggaaaagagaatttctaaagcatcatttttctcctttaaattcagaacttgaagaagtaaaaacttcagccttggacaaaaacactagcagaactatttgtaagtgttactgtattatctttatccattattagaaatgaaaaatggttgactgcatataaacatgattgcatgaagcttggaggcctcatggtatcaaatgataatgacaccatgctgttattttgctggtgctttgtagactggtggataggtcatgaaactgttagaatattgaatattttgagaactaaaatttatacgtattttgtaacgagtaagctaaaaagttttacaagcaagaatatcatatatttttgagtagtcataattaaagtatgaccatgaaatatgtgtaagatgtttattagcagagggttagaaaatctggcttgcagtctggacctaatcttaagctaatttcatccaggtgaaggtgtaagcttaaagatattatgttacttaaacctacagagcaggtatgcaaagtagatttttattttttggtatcggttgtgtttagatattattacaaacttcttttttttttctgacatgaagacatcgttgggtcttactcttcttgcggtagtgttaatagcagtatcttaaaaggatactagattctcttcatgcaagtagactttaaaaaattggttttgaaaacttcaagtatataaaagttcagagtacgctttgatgaactcccatgtgcccatcccccagcctcagtaatgatcaacactttgccattgttcttccattgattccctccttttgtggttggttaggggtggaggagagtattttcaggcacatcccaggcatcagattatttcacccataaatatttcagtgtagatctcctttaaaagggcctttaaaaaacccccacaatcacctaatacctattcattttgatttatcacatataacaaaattaacagcagttgcttagtatctccaatagatagtccatgttcaaattaacccgattgtctttaaaatgtctttttttcctcctgaatcaagatccaaatgaagcctacacaactgttgggtgatatatgttttgtattaatcagaaaccaccaacccttttattaatattatttatttattgaagaaattatgtcatttgtcccatagaatttcccacattctgcatcttcctgaaatcattgaacatgtttgtttgtttgtttttctgtaaactggcagatagattttgcacttgattagatttagaaccaactcttttggtaagaatagtccatagatggtaggtactctgtgctgcctattttgtcttttcatcaccttgggaggcacagagtatctggatgtcccaaaggggaatttttttgcctgtaaaataatgtgacatatcgtctacttgctggaatatttctgaaaagaaagaaaaaacattaaaaaaaatgtcactgttgccaaagtttacttttaaaattctggtgactttgcccatttcttttatgctagtaggatattacttctcacaaagagcagtactgcatattcttggcctctgtctgtgtcttccttgctgcctctcatcttcccgccctttctatttattcatccacccagtacctatggagagtctgtggtgtgttaggcggtatgactgaagcagaggactaaactgtgagcaaagagatcctttcctcgggggtttataatgtagtgggagaaatagacgaggcaatataggcaatgataccaacatagcatggcaagctatgataaggcaagcacaggggatttgggaacccaaggatagcttcctgagaacagtgacagctcttctgagagctgaagggtgaccagatggtggcaaatgaaggatgaatgagggaatgggaaaaatgcataggaaagcctggaatttggaggtaattgagcagggcgcatctagggggatctgcccagcagagccgtatccttggctctgctctggaaagtgcttggacagtactgctaacatatgcctccagaattcagaatttttttctgtccctcccaagattgaatagctttcctgtggcataaggtaattcttgatgaaagtcatgccttcattcaggctacagccaagtctagctgccctagaagtcatttggtctctacgttaatctgttctgatttattgtttgttgataggaaggttaaattttagaaaagttttatttttcttatttccatgtgtttttgaaagctgtaagttttatcttttatcctgacctatccccagaactccaaacttgtatatctgtcagtttaacgtctgtgcatggagatatgaggtacctagttagtagactaggtactccaaatttaacttgggcaaaactcttgattttcacatccccaacctgcttatttttatctttgtaaagttacccttatccaagttattgcttgagccaaaacttttcattcttctttttctttctactttggtacaatccattagtaaggtatgttgactgtgttcccaaatccacttacttctcatcttcactgtgacactcttgtccaagccagtgctgtctctctgaattactctggtaaccttctaacttgttccctgcttctgctcttgctcccctacacggcattcttcacacatcatgcagtcattttttgttaagtgaccgtgtgaaattgctttgcttgaaaccttgcaatgatcccccatctcacttaggataaaccccaaatgcctcaagttttgttcagtagagttatgatgtgagtactcgtgatcaaatctttcatgaatctccagtcacaccagttctacttctgtttgcatcttccactctgcctgcttatgtcatttgtatcttgctgtgtgttttttctcagtttgcttctgcgtgtgtgtgtgtgtgtgtgtgtgtgtgtgtgtgtgtggctgtggctgtgtcattgggttattttccctgttgctgaggctttctttttgtctctcttatttatatatttatttatttgttaattatttttgagacggagtcttgctttgtcacccaggctggagtgcagtggtgtgattttggctcactgcaacctctgcctcccgggttcaagtgattctcctgcctcagcctctcgagtagctgggactacaggtgcgcaccaccatacacggctaatttttgtatttttttttcagtagagatggggtttcactatgttggtcaggctggtctcaaactcctgacctcaagggatcacccacctcagcctcccaaagcgctgggattacaggtgtgagccacggcacccagcttgcctctctttttaaaataatataaagctgagtatcattttatttaatgaatagagcctttaaaaacagaaaagcaaaacaatttctgttgtactctcaaaaaagaataaatgtttttataaacttgtggacccttctgtcactcagtcttctgtgagtcagtggtccctggcaacaaaatgatgtctgattcctctaacccaaacattgttgttgaagaaatatgaagaatatatagatctgcactgtctagtatggtaactgctagccacatgtggctttttaactttaattacagtgaagtaaaattaaaacatcagttcctcagttttactaactacatttcagtagctttagttgtacttatatttgaatgcttaatagccacaggtgaccagtggctactgtattggacagtactctagagaacattttcgtcactgcagaaagttctgttggacagcactgctgtagtatattttatgcactggtatgttttatgtataccacttgtgagtgactgttatactcattagccaaaaattctatttaaaatcttttttctttcttttttttaatctttgtaaaggtacccttatccaagttattgcttaagccaaaacttttcattcttctttttctttctactttggtacaatccattagtaaggtctgttgacttttgtattaatcagaaaccaccaacccttttattaattttatttattgaagaaattataccatttgtcccatagactttcccacattctgcatcttcctgaaatcattgaacattttttttttctgtaaactggcaggtagattttgcacttgattagatttagaaccaactcttttggtaagaatagtccatagatggtctgtcgcccacgctggagtacagtggagcgatctcggctcactgcaacctctgcctcccaggtgcaagcgattctcatgcctcagcctcctgagtagctaggattacaggtgcctgccaccatgcccagctaattttcgtacttttagtagaggcggggtttcaccatattggccagggtggtctcaaactcctgacctcaaggtgatccacctgccttggcctcccgaagtgctgggattacaggcgtgagccatcacacctggcctaaaatattttttttaaactacaacaaaaacatcaaaaaaattatgtgaacttccaccaatatgctactggtaactgatcttacaaagaatgggcacatgaaaagaacagaatacttatttatgtatattgggtcacaaagcagtcatatttgtttaaaaagctaaatgtgctttttgtttttatttcagatgatcctgtacatgcagctccaaccacttctacgcgtgtgttttatattagtgtaggggtttgttgtgcagtaatatttctcgtagcaataatattagctgttttgcaccttcatagtatgaaaaggattgaactggatgacaggtattgtacatattttgggaaagaaaaaaaatgaaagcagttatttgtatatatgtgggagcccatacacatcgatgcacagtggtgcagggaaaggagggaggatgattaagccccagccaaaggaaaaataagatgacctaatcactgtctctggtttctctgattttatttttattttttaaaaattaagaagtcagaaattagttttttagttgttgaggaagaagtggagaacaagtagttttttctattccctttgacatgactctacctcagaccattgccttttcaaaatagccctgtttcttccttctagatcttgccttcatcattctccctttctctcttcctccctccatccatccagtaaacatgtattgagcacctgctctgatttaaaccattggttctcaacctggttacacattagagtcaaggagaagctttgaaaacatactggtatttgggtccaccttccagagattttgatgcagttggtttgtggtagtatttggggatcagtatttttcataaagcttcctggatgattctaatgtacagccagtttgagatatactgggttagatactatgctaagtgctgggaacagaaagaaagaatgatatactttatagtttcaagattttaatcttttacattaacctgtaattataaaagtatgtaatttgatgactgtgatatgtatagtaaagtgtgtgaatacaaaaggtgcttgtccagcctcagtgagtcagagatgacaaggaggacattatagtcaagttagggtgagaggtacagatggaatgataggtttattttcataacaaacacttcttacttccctcctctgtgatttccagttgctgcctgaagacatgccccagctttgtgacttctttgaaagccctcctttatgtggagacgtatcatccatactctttgaaccttttctcctcttattgctgtatccttacttgcgctccagtcaaatgatcacttattcctcactttcgccccacactttgcccttcaggacttttgttcatgctttcttcttcccacaagcctccatgcattttccaccagtccaaacttggtccgttcttcaaattccagctccattgctgtctctttcatgaagtcttttctaagcctcccaaacacccctttctctttgtctctgtctctgtctctctctctctcgtagcagttattgcactttttcttctataattttttgtgtaattgtcttacctttagaatgtaagctttttccagttagggagcagtgtgtcttactcattgttgagtcaccagtcctaattagtcttaacatgcagctgggaagcatatttgtggcgtaagaatatgaaggggaagggagctggttggattcaatacctgccccttagtactctttgtccccactgttttattttccatttctgtgtggagaaagaagagaaaagggatacgaatgagaaggaagtacgtatatgatttgtttcagaatatgttttgtgtacatgatggtggtgaagttaggtttagattttacaggggaagaaatggcatttggaagcgattgagggaacattttgataggactttgagagaggatacaggtagagaggtgactgaagagcatgacatttggaagtcagtcttgatatagccagagagttgcgttttccttgaatgcttgcatgcgtgctagggctgtgagcccacataggccagaattttgcaataactttcagattccatggggcatctacctctgcctgctgaaataattagttaccatccatgaattggtgttccagttctctttagttttcaggcaaaagtttccagacattacctgagtaaaaccagcttatattatcacgttttcagagcatagtctagtggtcaagagtacggactctagagccagaccatctctgtttgaagcctggctattctgtttactagttttatgggctacatggattaagttatatagcctatgtgtgtctcagttctcctctgtaaagcagaaatacacacctagtaggtatgttgtgaggttttaatgaaatacagtaagctcttaaaacagagccctacgtatagtaaatggcattttatgaagtttttaataaagttgcaatatgctagtatgtccagaattggttccttctggtgggttcttggtcttgctgacttcaagaatgaagccgcggactctcgcggtgagtgttacagttcttaaagatggtgtgtctggagtttgttccttcagatgttcagatgtgtccggagtttcttcccttctggtgggttcatggtctcactgacttcaggagtgaagccgcagaccttcgcagtgagtgttatagctcttaaaggtggtgcatccggagtggttcgttcctcctggtgggttcgtggtctcactggctttaggagtgaagctgcagaccttcgcagtgttacagctcataaaggtagtgcggacccaaagagtgagcagcagcaagatttattgtgaagagcgaaagaacaaagcttccacagcgtggaaggggacccaagcaggttgccgctgctggcttgggtggcctgctttttttcccttatttggccccacccacatcctgctgattggtccattttacagagagctgattggcccattttacagagtggtgattggtccgttttacagagtgctgattggtctgtttttacagagtgctgattggtgcgtttacaaacctttagctagacagaaaagttctcaaagtcccctacctgattagctagacacagaccactgattggtgcgtttacaaacctttagctagacacagagtgccgtttggtgcatttacaatcctttagctagacagaaaagttgtccaagtccccacccgacccagaagcccagccagcttcacctctcactagtagtgatggacaaagttcttctgccctttcctgtcctattaacaattatttattacctgccaggcaagctaacagtggtgaccagaaagctcacatccagttatccaacagcatttaagagacatctgctgcttctctctctgcataggggccactgggattaccatttattgagtgttttctgtttaccagtactgtaccccaggtactttatatgtattatcttaacacagccacctagaaataggcttgaagagattaaataactttttcaggattgctcttctaggagcagggcagagcaggcgggactcagtgttgtaatagctatgtgttaataatccactattgtcattgtataaaacacttgctgtgtgccaggcactgttccctgtgctttacattcatgaactccgttaatcctcacacagtctggtgaggttagatggagcccatggctccgtggaattcattagaaagggatggtagtgttcttccattccaggcacttaggagccactgcttgttataaacagatctcattagaggcagagaattaacactgcctgagatatgcccatgccagggcagttggagctcatgtgtgtggctttccctctctcaacactgcaaattgatcttttcagtctctttgttacgcctgatgagtctgtcctggataggcagagcttctctttacattcaccctgaagtcctgcagaggggttggtctgcagcgtgtctctactgtagtctttccctgttagtttgtgactgtgggaaagtttattactcctttgtgggatgcttgaacttgtcatctggcagcatcttaatttttctcttccagtttccattatccccaccaccgcccccatgccattactggtgacagagtttccctttaaaatctttgattttatatttaatgcctaactgtctgacacatagtaaaatactcagtaactatttggttgaataaccaatgaatagagggaggaaaaaaaccattttgttttaccaatcattctttgcttttttcacaatagtttgtgccagaaatgaccattctgtctggtttatgttttctgtcccagggaagcgtggttttctctgttcattgattgactcagtgttagttgagctgtcactggggctcactctggcccacttgcggcttattgtgccaggtactggcataagtgctggggaaggagaggtgaataaacaggcacttgtcctgcctttgtggagtttatagtctggttggatgagacagatattaaacaaaaaaaatccttactggaatgtaggggtcacagtctttgtctgttgcattcattgctgtatctctagcacccagtacagtacctgacatgtagtagatacttaataaatatttgtggaatgaatggatgaagtggagttacagagaaaaatagaaaagtacaaattgttgtcagtgttttgaaggaaaattatgatctttcccaaagttctgacttcattctaagacagggttagtatctccatacataattttacttgcttttgaaaatcaaatgagataatctatttagattgataatttatttagactggctataaactattaagtgctagcaaatatacattttaatctcattttccacctcttgtgatatagctatgtaggtgttgactttaatggatgtcaggggtaggtccctaattgcttcttgcttctatcataacagtaagtcttggattcaaaaaaaaatttcgttctgaccacttagcatagtgctttgcttattttagggacccacttaatatctgttgagggaatgaaaaattgacatagatgtccctgtaacgcctttgtgtgcctacagtcttttcaaaaattctgaggtagcacaagagtgccacctactgttaagttaatggagagactgtgtctgtgcacttagtcatcagtgatgttggttgcagataatacttaagaagtactttcacatatctcatacaatttgagcctcacaaaaatcctgtgaggtagattatcttaatcccatttatttcctccccttttgaggatggtaatgctcctcttccctccccattattgaagtctggacttctaacagctttgatatctggtttgatttttgagtggtactcaactgtaaaacagagtcctgtaatccctttttgctctaacgactggagatgcataatattcacataattaatataactatagtagtatactataaattagtaacaataatttataaagatatgtttgagggctaggcaataaatgctttacttatttatttttcatgtaatcgttttagcaatcttatcagaggatagtgttatgcacactctgtccacgggaatttgaggttccagaggattaaatagtttgtcctaggccgtacagctagtaatcgatgatactggcagttctgacttcacggtttatgctcttcatctcttttctatattgacctatacccactgcattataaactcatatagatcaattctgtaataacgttgagccaaagaagctcttccagcactctgaccagatgatagcctaatgaatctttattatagtctctttgagttgcaaagtatcttcgcagagttgctggagaaacagggctaactgcagcatcacaagaagaagtatcaggttggtgcagtaattgcagtttttgtcattaaaagcaatagcattaaaagcaatgacaaaaactgcaatttgcaattacttttgcaccaatctaatagataacctaaaatgatggacatcttcagggaaggcatgctgggggggcatttcattaggcaaacatgtatcttgagatctatggttgtgctgagcagaatggtttgcatattataagtgctctccaaatgtttattgcaggacatttctatcttaatttttgctatgactttctacagatgtttggttacaatagcagatagtagtatattgtattattagccatagaaaggctacataaagacttacagtcctcattgcctggatgttatatatttacatttttcagatttgtgtatgggctcttgaaattgataaacattcatatataaatgttatagattacatagcagccgtgtgtgtgtgtgtgtgtgtgtgtgtgtgtgtgtgtgtgtgtgtgttttgtttcagagacagggtctcactatgttgcccaggctggcgtcaaactcctggactaaagtgatctgcctaacagccttccaaatagctgcagctacaggcttcacaccgcactcagctttattatgtatttttttaaatcaccagtttttgaaaatacagaattattatgtgggaagtggtcagttaaaagattttgcatattaaggaaagttggagacttgattgggcactgctgatcctgtagctaagagaggcattgaaagacctatcctgctatctggtttcacccttcatgctgaatttctatgtttcacgtctccactgctgcaaaattataagaactaaggcagtgagaccgaaatgtacccacgagacaaggtttctccccactgaaaagacaaaactacatgcttgagcagcattactttgcagtaatcttgaacacaaggtttacaattatttgaacctatcatcttcttggtgtcctgtattatttagagaatatggtgtagtgtttcaagtactagagatttcccagaagttggatgaaagggagggattggggaagtagaagaagcaaaatgtattgtgtttaaataaacttgaaccaaatttgatactttttttttttttgagatggactgtcactttatcgcccaggctggagtgcagtggcgtaatcttgactcactgcaaactccacctcccagattcaagcgattctcctgcatcagcctcccgagtaactgggactacaggcacgcgtcaccatgcccggctaattttgtacttttagtagagacagggtttcaccatgtaggccatactggtgtcgaactcctgacctccagtcatctgtccgccttggcctcccaaagtgttgggattacaggcgtgagccaccgcacctggccaatactcctttctaagctccgagcatgttggcacatttgatttggtttgctctttctttatctgtaggccatttgatattgggccatcattgaaagaggcctgtctttcttcttcttttctaaaaagcaatctaattgaatgacatgggctctttttttgagagatgatccgtagttccctaacatatttgtgtgtgaagtttaggacaattagctgaggtgtctgagcactagtacctacatttctgaataattttgataagatgaactcgcttaatgattttggagatagaaatgaaagaaaaaatagagctctataggagttagattaaaatatcagtattggaacatcatgaattattgtgatctccgtaaggattttaggctggttttaatggctatgtgcattttgtatgtatggaaaaaggaaatttctcattgaaactgacttgtcaaatatttctctcaaaaattgtttgcagcattagtgccagcagtagttcccaagggctgtctcagccatccacccagacgactcagtatctgagagcagacacgcccaacaatgcaactcctatcaccagtaagagttaatttaattctaaagccagtttactcaagttgtctatgctgcttcccagtggtcttgcatggttagtgtacttgtgggacatgttgtgtaaatcgtatctaaagtatgcaaaattaggtatgctcttcaacttttgctttctagagcattgaatgaaacattctaaaattgaggtatcaaaaatgaaatttaagtttgctagaattggtgtggctttcgggagatttccatagatttattatactaaaagggctactaagtcacttctatagaaattcaaaaggaagatttttcaggtaactatatggaattaactattgagctgcataaagacagagactttagactgtaaggaattgtttgatggtcttatgggccatggtgaagactttacattgttttttaatcataataggaagttagctaccactggaaagttgagaatgtcggatctgatttccttttttggactggcatttattctttagtaaaataagattaagatatctgtcctctacccagtgccctattgtggttttccagtactgtctcccatgaaaaagaaccaggattttttggagaaatggctgattccaggtctgagttaggaagtgaacaagataagcctgggacatgttgctgagtcagatatcaaggaaatagctaagacttgaagagcttccactggctaaagataggaccatttgatcatcaaaatgaataatgactataatgaattaaaacgtaaaatgtgtaaaaatccacaaatttgtaataatacattatttaacaaaattgttcattatgagaggtgactaaggctccagtgaataccttactctaccaactgactacatgaactgtatttcaggttaaccagatggtgctggtggatgagagaaaatttttctttacagatgattctcagctaataaatgtggaagaaattatataattagaaaatcacatgtgcaactcctgataaaatagttgattcagaaaaagatcatcagtgattgaaaggaaaatggggaactctgccattgagggatcaggctgtcaccacctgaatacactgatgaactcagcattactaaaagtaggggacctaggtatttcgtacccaaggatatgatgtaccattcatggagcattcttttctgtccctgctgcaccccctacaagttaacctggatctgatcaaggttatagacctgacttacagtttacaggaaatactacttgaagaagtagaggccaaacattttccagggtagccgacccagtttcttcaataagacagtggcaagaaaaaaggaggaaagaaggcattatacagtaaacaaaatttaagggaaataataatagcagctactcttcccactaatgaagaaagaaatatatgctttttaggaaatacgatagatgtgaaagtagtttaagctactcagaagaggcacatcattgcttttaatgtttaaatatcaatctttgctcattagaatggattcttaattgttatacgtgacctcaaagaggtagggaattgttgttatacatgctaaaatactttcttaaaaaagtcaaaggggccgggtgtggtggctcttgccagtaatcccaccactttgggaggccaaggcgggcggatcatgaggtcaggagatcaagaccatcctggctaacacggtgaaaccccatctctactaaaaatacaaaaaattagctgggtgtggtggctcgcgcctgtagtcccagctacttgggaggctgaggcaggagaatggcgtgaacccaggaggtggagcttgcagtgagctgagatcacgccactgcactccagcctaggcaacagagtgagactccgtctcaaaaaaaaaaaaaagtcaagggaaataaatttatttatcttttaaaaattgttgccatcaataagaaatttacttgtttgtaatcatggccattaccgtaaggagctagataatttacttactacatatatatatactgaaaacaaacactttttaaaaaagtcaatagaaatacatttgtttacagatagaaaaagaggaagaaaaaaatatttgaagacatagtagccaagaattttctaagataacaacgcaacagatcacagatccaggaaactaagagaactccaggtagaattaaacattcacatatactcacacacctagacagtctatcacagtcaaactgctgccaatcagtggtttcaggtggtgtcagtctacatgcattgtaaagttgcccaaaacttttcatgtggttctcctggcaaccattgatgatcattgcataggtccactaattttggggggaggtttcttcccattatctggagatgccattccaacttctacttgctaaagccagattttccttttattctaacattttttttcttgaagtgaaaactaatttgtggctgtaaattctgtttttactgtcattgaattaagaatgaatgggaattaagggaacttattaaatttgaatctcacaatggttttactaggatgtggtaataccagaataattacattgattatgtattttgtttgaaaaaagccttttcaaacaaaaataactttctgtttgaaactttttgtttgttcaaacaaaacaacttttcaaatgaagagatgtttgaaaaaaatcttttcaaacatgtcttcatttgaaaagttggtgtgttatgagactatattagaaaaccttttgggagaaaaactgtccataagaaggattaaatgaaatttcacagatcaaagcttgtttcatttggctaaaaggcaattgaagtggtggtcatggtaatactatttttaggatttcttgttgcagttcagaattttaacattttggagtagtattgtggtgggtgaggagacatttctttaacatttagtgtggccttcaaataactctcctagttcatatatatgcctgtttccttttatgattcttacactcattcctgtgacctgagtcctgaggttctaactgaactagttgactccaataccataataagggtatttatattgcttggtttggctttgttggctccttaggttatcctaccttgcggatagagaagaacgacttgagaagtgtcactcttttggaggccaaaggcaaggtgaaggatatagcaatatccagagagaggataactctaaaagatgtactccaagaaggtatttattatctcaaagtcggttttttaagtatgatttaatgttaccactatagacacttttttcaaaaatttaaaaaatttcatctcattttgtgtctaagataaggataggaagcagtgtatggtttttcttttataaaaattattttcatttgctcctatacttgaatgggccttgtacaactttggtgcagttcttgattttcaagtatattaaagcacgtatattattgttggctatatttaaggtgtattctctgtttggtttttatttaaaatggccactacctggcaggtctctctgagatagtctaagttactttctctctgacggataacttgggggttgtagcggaaggaatggacatgggcttgggctttggttttggtccttagttccaatcccacattttattctccgtgtggctttggagaaatcacgtaatgtcttcagtctccagttccctcctctataaatttggactgcgttgtcatctcttagactagttataaagatgagatgaaattaggtacagtaaatgaatgaacacataatagtgtttgccaggtgttagtatgcttcccttcacctctcactgggccttgctttcctttttgaattggagggtattgattagggagatgctgaaagaagaagacagaaattaataataaaatactgcactgagctcttcatgttgttaaatagagaattacttttttacctccactgtaattcagtttggaatgctttggatacttatgagtcctccttatgtattcctttgctggttgggacacatttaggtcaatcacagctaagtcaggtacttaaactgtccccagtagcaaatggtaattaatggaagcagattttctggtatgtcttaaaatgcatgattgccacttgttaatagttgactgttttctaagcataactagtttgcagatctttttgcaatctgaagagagtaagtagaccaggtagcatttcctaaagaataaaaaaaaatgagagatcaattaatgttatatttgcagtttcttttggtctctgaatgggatagaataggcaatctgttgtagtggtatgatttgagaagaaggaattctgaaccaggtagagtttttctttattggtcttttcaggcccataatagtttattttaaaattcttttgatttcagaaaagaaaatatggtggctgattaacatttaaaaaggtggtcaggttcactggaaatctgataaatgcaaagaaaacaatagttacatgcgattttttttttttacgttagtttgtgaaaaagtaaaaagataatttctaggttgacgggtatggaggaacacatgctcttttacattgctggtaggaatgtgaattgctgtaacattgtggtaaagtaatatgtacatatatatttttgtgtatgttccttacttccattgtttttaagtatatgtaaatctgtgtttgagagtaatatttaaaaatgggactaggtactgggaagaggagacaggaggttttgcagtgcttcagtgcaagagagttaagaagctcagtcaagcaaggtgaacttggctggagagagaagggaaaacctttgtgaggaagacaggtcagggtgtgtagctctatgtattgactagagtgtttgaagatatttactcagcttcaagcaaaatgtcttaaatgaagattatccaaagtcttttctgccttgagcatacaagttactctgtctctaggccacagtgaaacctgatgatacatggataccaacaactccacctcatagagtggaaggcattagagcaagcctatttgtatgcatggtatctgcagcaaagtgaaactatttgcaagcttatcttttaaattgtgaaggaaggaaagtaaacaattttctagtgagaaagagtaaaatgagattcattttcagtgatcatcttgtttgggagttttctatgggcaattacaaaattggtaataaaatctagatggattttcttagttccttccctagcacccgcaaaggtcataactaacttctcttattactataagagtttttgttttttgttttttttttttttttttttggcggagtctcgttctgttgcccaggctggagtgcagtggcacaatcttggctcactgcaggctccacctcccgggttcatgctgttctcctgcctcagcctcccacgcccggctaatttttttgtatttttttttgtatttttagtagagacggggtttcaccgtgttagccacgatggtctcaatctcctgacctcatgacccgcctgcctcggcctcccaaagtgctgggattacaggcgtgagccgcgcgcagcctcttctcactctaagagtttttaggaacacattttaccagtgaaccgagagtctaattggcttgtctgagaccttctgaggagtgagtggtagaaggaatggaacccaggactgtctggatccaaaacttgtactccctggccttcccttgaagctactttttaaggctctgcggtagagaggaaagttcatttttgtcttttcgtcatttctctgaggctaagcctagaaactcataaatgccattgtggatacctcattactgagctccaatgctcctggctatatcattagtttatttagtataattcaggaaaattttcatatacttagtttagatatggtgtttctgaaagcaagttaagatgtgtaatagtcacaaaaaacttttaacagtcgttaaaaccaaagatttgggtctttttactctagggctacagtaatgttgatcacatatgaccttgttatttttgttttatgttatattgtgccagaaagttttgtactataattttatgaatgttgtatgatctcattaattattacttttccttttaggtacttttgggcgtattttccatgggattttaatagatgaaaaagatccaaataaagaaaaacaagcatttgtcaaaacagttaaaggtaggatcttttttccatagtatttccatgatgctcttctgtctcaggtggctcctgccagcaaaattctgtctcagtttcccaatgtgtgccagaccttttaaatcagtcagtgttaatttagctgaaaacaaaaattgtcttatatgagcctaattgttttggaaatttgggttgttctcattaagtatagaaaaacagaagtctgttaaattaagacataagacatttcttagatattactcagttaattgcaagtcaaactgcatccacttgatttcattgttactatgtttagtgttggtatacttttgcaggtatagccatagttggaattgctggcctaagggtgtgtacatttaaaattttaatagagcccaggtgcagtggctcatgcctgtaatcccggcactttgggaggccgaggtggccagatcacctgaggtcaggagttcgagaccagcctggccagcatggtgaaacccctgtctctgctaaaaatacaaaaattagccaggcgtggtggctcacgcctgtaatcccagctactcagaaggctgaggtgtgagaattgcttgaacccgagaggcggaggatgcagtgagccgagatcatgccactgcactccagcctgggcgacagagactctgtctcaaaaaaaaaaaaaaatatatatatatatatattgttagattgtcctctaaaagatagcactggtttatattgtcatgaacagaataactgttttcacatattcttcttttgggccagcgtttgaaatgtgacgcctaatttttaatttattgatgtgtataagttatttaattaaagattccctatcaagatactacagtgttatttatgcaggcatatggcttatttcctattactggtagatttgcaagactttaaaaaatactagaattttaattacttacaacagatgcttgtgaaagcttaaatagttctgaattaagagctgggtgcagtggctcacaattgtaatcccaatgctttgggaggctaaggcaggaggattgcttgagtccataagttcaagatcggcctgggcgatatagcaagaccccccgtctctacaaaaaaaaaaaaaaaaagtagctgggtgtggtagcatatacctgtagtcccagctactcaggaggatgaggcaggaggattgcttgagcccaggaattcaaggctgcagtgacccctgatcatgccactgtactccagcctaggtgacagagcaagatcctgttttaatttttaaaaatgatgataataattctgaggtaagtcttatttgcttatctagagagaaagaaaaatgtgataatttatagggtgcttaatgtctatcaggtctgatgtaaattgagaagacatgctaataatatctaaaaacaaatttagcactttcccttcagaaactgaagggaagattaaattcagttttatgagtagaaagtgataaaattttatacagtttatgaagttaatttataagaactgtttctaaatttacttaaaggaatacatggaaagtatgaagggtttatgtttattggttgtaaaaagttgggttataccaatctaacaaaaaatctttggaattgcttttaattgaacaaaattgtttgtttaaggctgctacaaatacatccatacacacacacctctttaatattttctaaacaagtggtttaatttactatatcattcaatatttattttattcattcaccccttcccagcaccaaaaacacttttaaagggtaatatttatgtgttaggtccatcctttcggctaagaccaagtgtaagttaggtcccagtaggttttctgactaggagagtttacatattactttttgtaaatgtaaaatttgaactataaggttattaaacaacagccttttgttactcttttctcattttttttttaaggaaactccttaattcaaatatttcttccggggtttgtaagtattctatagactgtgtagaactgggctattattgacttgttctgaattaaggaaggaggtttttatacaaaattgggttgatttagggttggaaggggagataaaaggaaataatagtgataagaaaacacaatgagtatacttggactgtttcacaagataagacttctctttccgtatatgcttgacttgtagtcactggttgtttctgtgctttaccactgtaattataatgttctctgtgagctgtgcggaaataagagaaagcacagtgagtccttatgggggacagaggggaagtgcattgcctcaaatttgttagagagatagcgccacatgactgtctctgagattgattattttggaatgctgtttttatggttttagttgtagccacatagagctgaccaaggtctttcacaaatctgtatgctttgttacatgttgcacaattagaagtttagcataaaataaaaaaacagtgttttagaaagcactgacctttgcctttaggcataagcagaaaattggagtttggcttttaaaaatattcataattttatacagagacttcatagatactccagtataaatttccagagattgaaattagcaacccgaatcttacacactaaatattgtgaaattgaattccataaaataaatgaatcagtttggatttactggtattaagttcttattttctttattatagctactaaatttttatagttttgtaaataagcaagtgtttgtttttaaaaatcattttgtgcatccttgtaacttttagaatatatttaatagtacccttttcaaatgtgtacatcttgaagatagacctttcattatgtaattaaaagactaggatgagactgggaaaggaatccaagaaaacgagtttttcttactaaatggataaagttattttatctttaattgagttttcttagatcatcattcaagtgtcctttgctttaatagaacatgcttatcaaaataaaaacttgaaaaaagtaagtataaaatgacacattctgaaattaccatttgttgtacttagatctccttaccagttgagggaatggtaaaagtctttttaactgggcagggacctccaactattactagttttcagtcttgaaaagatcctactagcctccagtagtcctggccataatttcattagaaattatttaggttatagaaagagtaataaaggcacattttgctatttactaagaaatcccacaagcagtttgtagacacttagagtttattccagcagacattgatatgaagcaccttttccaaagaagtaccgaatgtttcagatccttggctttttgtctacccattttacattcctacaaaagtcttaactaagagaagttgcttggaaaggggacacttagtagcaagtaatggaagtgaagcaagacgaagtgaagcaggaatgagattccaatgggtagatgtggaagtaaatgaaatttgagatttctcagctttgacagttccacatttaaagaccaaatgtgacaatcatagtatctgaattcagtggggtgggttttattgttggttcagcattttcctaggtgggtctagaatatgaatcttggctttgccagtcttttacatttctctcttcctcttattgcattggtccgaagctttataaattattatttaattaattaattaatttatagatggggtctcactctgtcacccaggctggagtgcagtggcacaatcatagctcactgcagcctcaacctcctgggctcaagcaatcccccacctcagccacctgagtaactaggaatacaggtgtgcaacaccacaccctgctaattttttttttttttttttttttttgtagagatggggtttcaccatgttgccagcctgagctttacaaattattattgctgtttttactactgatgtaaaaattcgttatgggtttctttgaaagggtttttaagaatatactgttaagtttgttttaacatttaaaaactattttttaaaattcaaacccacttcttatttgtttattattattattttgggagacagggtcttgctctgttgcccaggctggagtgcagtggtgcaatcatggctcactgcaaccttgatgtccttggctccagcaatcctccagcctcaaccccctcagtggctgggactgctagtgtgcaccaccaggtccaactaattaaaaacactttttgaaatagagatggggtcttgttgtattgctcaggctgatcttgagctcctgactttaagtgatccccctgcttcagcctcccaaagtggtggtattacaggtgtgaaccgctgtacctggctgcattttcaattttataatagaaatattcttttcaagcagtggagaaattcctctatactgttaaggtcgtggtccctataagatgaggaatccttgtggatttgtgcaaatatttgaaggcttaaaaattcctttggagatgtagacttaaagatattggtaaattgcattatcatgtttttgtttcaaaaacattgacctaaaagttcatttgttctgttttgctactttggaccaaaaaccatgagtttagaaactaaaactaaaatggcataattctaattttggttatcatatgaaagttaactatatttttactactgtattattagttctttttgtttgtttttaaccacagagaagtaaaaagaagaaagcaacagaataggccataatctccaatcataacttttgtagtcattttatacctgtaatgtttgttaggttaggaagtataaacagaacagaaaggtacaaaacctaaattctcccatcttgaaaagtagccatcatatgtaaacaattccttaatatgtaagaaatattaggatatgtaaacacaagttgtaccttgtttttgaaatttaatataccttagagatcgtcctctgtcagtacatatctcatttttcaaaagtagccacatagtatcccattgtgtcaatttaattagttctttgttagtgggtactttggtggttgagtttttttgccattgaacagtgctcttattacattgtacatagatgagcttttgtgactatatctgtaacagagactcttagcagtgggattgatgatggaaggtatatctgcatttcaaaattttgttacatgttgctttctccatctatccaagctactattgatgaacctgttttctcacactcttgcccaaattcttaatagtaggtagtggaattttttgtgtctcaatttgacaggggaaatggcatctcctggtttaatttgcatttcttaggactgaggctgtgagtcgttttgtaatcttgtgtgtcatttgttttttattttctcagtgaactgtgtgtttatatcctctgcctctttttcttattgatttatatgagctatttaaataggaaaaaaggaagttagcagtatatatgccttatgtgttgcatatgtttttccagtctgttattgcattttctgctttgtttatggaaacttaattgattttaatataaaaatttctgggaaaattgacctatttaatgagactgcagtagaatttttatctagatctatttagatttacctgtaacttataatgaaaacctatgtaccttatagttcaagataattatttactaatagcagaaaatgttaatgccatatatgtagtattattattcaagacattttcttttctttatatatagatcaagcttctgaaattcaggtgacaatgatgctcactgaaagttgtaagctgcgaggtcttcatcacaggtgagaggagaaaccaccagcatttcagtgttgagcatggcaacacttgatgccacatttttatgtgcagaacattgtgatgacttctgaattgaaagctttgtggaatagcttaatttttttttctgaatataaaagtgaaatgcattctcattgcacaaaacttacaaacacagtaaagtataaaagaaaacaaagaatagtatgtaagcccacatctggataatcatagctaatctagctgatctttccagaaataatttatacatatttatgtgcacatttccctttaaaaaataggatgatggtttacatatgttaaaaaatatttgttatgagatttttgaacgtataggacctcaaagtcaagtataataaacatgaataaatcttccttctagatgcagtaatagttaacattttgccatattttctgtgttgtgtatgtttgtgtatttatccatctgtatctagagacatatctctagatacaggtatctatatatttgtgtatataactattttataataaattagacatctcagtacttttagtgcatgtccagcatgtattttcaataaaaagaagatagttttctttataatcataatatcactgttgtctttgacaaagttaacatgcttcttaatttaatgaaacaatgtatctgacttttgatattggcaactgtaaatccatgtagccatttaaaaaggctacatagtagtccactgaatggatgtaccacattttatttaactaatttctggtatacaatcattatgccatagcatgatttttaaaaactacttatagttctatatgaagaccttttttttttttttggagacagagtctcgctctgtcacccaggctagagtgcagtggtgtgatcttggctcactgcaagctctgcctccctggttcacgccattctcctacctcagcctcctgagtagctgggactataggcacgcctggctaattttttctatttttagtagagacagggtttcaccgtgttagccacgatggtctcgatctcctgacctcatgatctgcccacctcggcctcccaaagtgctgggattacaggcatgagccactgtgcccggccatgaagaccttttttaaaagcttggtattggtcctgttcacagaactgtaacaaaaacttctaccttttgagccagaagcagcttaaatgtaacatcataatgtgtgacagtatcaacattagagcaaatttttttaaagcactatatagagtcaacataatttgtatgtctactgaaaatttgatcacatatgtttaaaaaaagaactgtggttatctctgttggaagatgtttataggcttctgaaaaaatatagtttctgtatactttagacagttccttgagttctgctgaaaaataaggtgactacccagagccttacttttaaatttagttatattttggttcatattcagaaggatttgaggacctaaaaagaaggcagccacagtaagataaataaaatggtaatgaaaaagaaactgagttttttggcattgtggtggtaaaaaagaaaacaaatgagccagcagtaaggagaacaaatatttttactgtgactgaacataaaacacctcctagcttctcggcaaccaagggtgaaggaaacactaaaagttgataatctcagtagcagaagggaaagaaacagttggaatattgtcctttttggcagtgttgaaagtgcttaatggtctattacactgactctagggagaagggccaaaggtgtttaatcctagtatataatgttaacctattacttagatacctagccaatgttcttaccccagtgaaaggtttgcatcacttcagcacagaagtgagtagcagggataaatgtagacaaagccaggattttcccaagaaacggttttatattcactgtagccttaaagatgtcttggctgaaaaatgctcagagcaagcatttgcagtgttgtgtctcatgcagttttagattgtaaggttttgcagcatcccatcaggatgaattagcagtctcaggaggtccttagggaattgaatgacattacatactaaattggggttatttgatactgagcattcagtccttgaggaaagtcttgtaaaggtaggttatagcttgattatgcttaattgttcttccttctatgaggtgatagcaggagtcctagttacaatgaataaaacacattgtcagcatgtagaaagtatattattctttccattcattgtagcagttcatttcatttttaaggtgaccagggcctatcacacattttgttttgatccttaatatgtatagactgttcatagctatacttatgtatttgtttgttcattcttttattctaattcattcagtacccattttgcacttggaactgtgttaggcagaatgaaaatgaaatgatcttcagagatcgtattatagaatttatcaagcaacagaatatagaatttattcagcaagaaaagacacctgtttttagattttaccttgtggtatgtaatacagcatgtttgcttcatgttttaacatccatggttacggattgtacgcgtattgaagtgttttaaagcattttgaaatcctttcttttcacacatttttccactggaatttatgaaaataattttattaaaagttaaaatagctgtatacataaaagatattaacctattttaatttcattagaagtgcttcacatcaaagtactcttgcgctatttctgcttgtagtttggccccttcattggcccaaagatgcctgatggtgaacacttcttatgccaaatggctcacagctctccctctgcaaacgccctcaacaagactgagaattagaggcagttcttgtgccaagccccacagaacctacccttcctgtaccttctttcttcactatagcatctcctgctttcattcactcttcttagagatccagaccttccccttcatcctccttttcattacaagatgggcagaatgaaaaacagccatttgtactttgaaacattttcatgaagtttgttagctctaccagtggatttttaatcctgtggtagtggaataaaagatttgacttcacccagcaaacctaatggataaaatgtctttaactctgctaaatgaatttcagtcacaaagaaagaaacagaagtaatctttggtgagttaaatagattgggcaacagtgtttaatggtatgcccaagttaatccttagtgtaaacctgtagtcattttagtattcatgggagttggtggaaaggaagctctgtaatctcccatgtgatctcccttgctcctctggagagaaagtctagtggtccaggggaatgcaaagggtattgaatcagatgaagatctgatatttttctccgtgtacttgctctttgtccttggcaggttacctaaactttctctcccagcgtggatttccttgcatataaagtggaactcctaatcgctgccacttgagcggttatagagaggttgcctcttagaggtttactgatctttaagtcctcattttcccacctcctcagggtcagtgctttccatgttagtaactcctgcaaatatgaggggagcgcacagctttgccacttgtgcattggtgattgtgccacggttttataactggggtttaaaaagtgatacatgctcaattaagacaatttttaggaaatacagaaaacaaagctgaaattatctatagtcttacaacttaaagacaactcttaactctttgcatatttccatgcagacctttattatttttctccatttttataattatcttgcaaatgggaattttttatcttactttcttgtaagataagcttttacttatattctcatattgtgaccaattgtgacttattatcctgttattctttccttattaaacatccttagaagcaggatttgccaagttaaggagtaggaatgttttaaggctatttgttactgttatttgttattaaatgtttgttttatatagcatagattacgaagtgttgggtataaaaattgagtttaccttagtttttgtcttctagcaatttttagcttagtggggaagatgatataattatgtaaaaagttacataaccttgggaaaaattagcagttatttccagatgtcagtggaggaggtgttattagacagtaggatgaaatgtatgtatgtatgccatagaaattaaaataggaacgggattgtccactacatgcttggttttattttgcacatcacagcaaccttttatggttggtggggtccctatgttataagaatggaaaccaaagccaagagaagatggtcactctgatagtaattggtaaatctaggattcaaaaatctgattctaaatccagtgtgaccagctaagaactttttggcttttgtggcagtttcagccttttagagaccttttttgatgatcatattcttgaccaccgtctggattgggccttttttttttttcatgtgtgataatggagtaagtgggatattgttatcataatacactcatgggcaagtcagtttttagatgtctctgattaattgccctttggagtaaagatatagtgtggttagagtgtgccttcagagaatccagcccacaggaagcaactttgagtttatgatttttccctaccaagaatgtgcatatatggggatatatgcacatatataggggacacttaagtctggtttaaaatacagaacacttataattttacatttttaatggtaatcatgtttttaagtattttggggattttgttttgttttagattatttttattagaagtaagcccctaacattttggattcctttgtctttctcccaattttttattattttatagaaatcttcttcctattactcatgtgtgtatagaagaaggagaaaagcccatggtgatattgccttacatgaattgggggaatcttaaattgtttttacgacagtgcaagttagtagaggccaataatccacaggtgagaaaaatttgcccaaataccaattatttaccagtagtttctgataatgtctttgaaagtagatattaacattcttaaatataaactgtttagaggcctgcaaaaaagaacctcaaaatgaaccacaagatatttataacctgttggcttaaaggaaaatgttggcttatgttcctgccttgaggcttacactgtgctgatgctgaagttttccttatattctcgttgtgtacttattcataatcaactcaaaccctttgtaatgccatcttaggtgttttcctgataactgagggtacttgtcctagatcttcctcttaggaatggaaacagactttctagagccatttggttcatactataccaaagtctggtgatgactggaggtctagattgtgggagataattggatgtattgttaatatgcgtggctgtaagatggcagtcatctaagagtgtttctcttccctgcttgtgtttataactgtaaagcaaaggtcagataccaagcatattatgatggtagtggtagtaaagcctagtgggttttttttgctgtcagctgtatcttgttgtcccattaagttgctttaggatttataatagtatgcttattatagttgccaggagaaagtgggttcaaaggctgcattcagtatttggcctaatatgtatcatatgctttgtaaattgacaagactaaagctgggattctcaataagtggttagaggctgtggctcatctgcattacctggggaaggattttattcctcagccccaagtactgtcatacacctagaagaacacatcagcagaaaaagctaggagctcgtactttgggtttgtgtgtggtttttttttgtttgttttttgttttttgtgtttttttttgagatggagtctcgctctgtcgcccaggctagagtgcagtggcgtgatctcagcactgccagctctgcctcccaggttcacgccgttctcctgcctcagcctcccgagtagctgggactacaggcgcctgccaccacgcccggctaattttttgtatttttagtagacggggtttcaccgtggtagccaggatggtctcaatctcctgacctcgtgatctgcctgcctcagcctcccaaagtgctgggattacaaatgtgagccaccgcacccagctgcagggtttttttgttttttgtttcattagacaggatctcagtcaccaagggtagagggcagtggtgtgatcacagctcactgcagcctcaacctcccatgcttaagcaatcctcccacctcagcctcctgagtagctgggaccacaggaacatgccaccatacctggctaatttaaaaaaaaatcattttgtgtagagacagggcctcagtatgttgtccaggttggtctcgaactcctgggctcaagtgatcctcccacctcagccttcccaagtgctgggattataggcatgagccactgcaccaggcttagatttgtgttaatttgaaaataatcccaaagagagaatctcctaataaaaactactgtttgggggaaaaaaagattactgaattataaacatttgaaatattaccttgagaactcagcattcactgaacagatgtattgagcagctgctgtgtgtgctggatattggggagatacatctaacagatgaaaggagacagagtaaatggtagattacagaataataaggactacagttgatataagtatagggatatatgggaacatagtcttggtcaagaaatagcttttaaaaattctgtgtgtaggtttaaagcagtatttttggatggagtaggattgtggaataaaaaaagtaagaaagtgccatcatatttgtgtgctatttgcaaaccatgttattttttgttaccacaggcaatttctcagcaagacctggtacacatggctattcagattgcctgtggaatgagctacctggccagaagggaagtcatccacaaagacctggctgccaggaactgtgtgtaggtgccatgagcttgacgctgtcacttgatgtagagtgcttcctggatttggggttctctgcgagtcacagtgggacttgtgttgtatttaagggtggtgatgatccctactttttaatactctgattgcatttgatgttcatatctttacttttcagcattgatgacacacttcaagttaagatcacagacaatgccctctccagagacttgttccccatggactatcactgtctgggggacaatgaaaacaggccagttcgttggatggctcttgaaagtctggttaataacgagttctctagcgctagtgatgtggtaagtgccgggacccccagatagcaaaagaatagagaaacagctttctgtttttaaatgttctactatttttatcttttgggtttttaaaaaatctgctagctgttcccggaaatttttatccagaaagcaagtgtaattagctgccagtcaaccagtttatggagaggagctgtgacccagaccataggccagcactgtttgtaatctcatttcatcctcacagtactgctctgacagaagcactttttttttttttttttttaagacagagttccactcttgtagcccaggctggagtgcaatggcgcaatcctggctcactgcaacctctgcctaccaggttcaagcgattctcaggcctcagcctcccaggtagctgggattacaggcgtgtgccaccatgggcacatgcccagctaattttgtatttttagtagagacggggtttcaccatgttggccaggctggtcttgaactcctgacctcagttgatccacctgcctccgcctcccaaagtcctgggattacaggtgtgagccaccacgcccattgacagaagcactattaacactaggagataggctgtggtatcccagttttaaaggtgaggattttgagactcagagcagttacagtaatttcattattatttctttcttatataagaggcagaccaaatagttgctagatcataaagatgttttctttttttcaggtgacctcttctaagtgttatggctcataaaatttgtaaatccccccgtcatcctcttccttttgtcaagtttctgggtggttttgccacttagccagatcatagttgggccctttgtgatgtacagtttcagaagccacgttcacttgttcatattttacagccatgtaaaatttctgtcacttgatttcttagtcttatttggaagactaagtgtaatttattttcctgtctcttgcctgttagactttattattgttgcagaatatttagggattaggtaaaacttctgcttatagggtcccacatatgttcactcagtgataatctgtttgtgttatatgtaaaatcctatagaataatttgcttctaagcttcaactgtaagaattgggcttactgtatcattgtattttgtgtgtctatattttaaaatttagggctactcttttgtttcaaagtgtgtatgttttaaggattaatcttttaatcatgtattactgtacgctaattaattatattaattggtatatactcatttcctcggtgtatgagttttctgtggctgctgtagcaaattactacaaccttggtggcttaaaacaatagaaatatagtctctcgtggttcacttctgaggccaaatgtctgaaatcaaggtgtagtcagggctgggctccttccagaggctctagtggagaagcagtccttgcctctttcagctctggtggctgttggcattctttggcttgcggttccatccctctgttccaagttcataccaccttcttcttcacatacgtctttcaaactctctttgcctccctcttaaaaggatacatatgatttagaacccacttacataatccagaataaacttttcctctcaagatccttaatcacgttttgtcatgtaaggtaattacaagtttcagggagtaggacatgggcatatctttggggctaccattcagttcactgcagtcaataattgaaatgatctaagatttctttactgaaaaactgatattctaatttaaaatccttaaaatgagaataatttgagaaaggggaaaattcctttaattaactctaactactaaataaattttttttcctttttagaaactatgtgctatttgatattgatatggtttggctatgtccccacccaaaatctcatcttgaattggaattcccataatccccacgtcaagggcgagaccaagggtggagataattggatcatggggggcaggttcccccatgctgttctagtgagtctcacgagatctgatgcttttatcagcgtctggcatttcccctgctcacactcactccatcctgccaccctgtgaggaaggtgcctgcttcttcttttccttcgtcatgattgtaagtttcctggggcctctccatcattgcagaaataagtcaattcaacctctctcctttataaattactcagtcttgggtatttattcatagcagtgtgagaagggactaatacagatatattgctccttttacataccaagtattttgataaaatgtgttcacttaatgtgaatgagcaatttacttatataatttttaaattttttttttttttgagacagagtctcgctctatcaccagactggagtgcagtggcgcgattgcagctcagtgcaacctccgcctcctgggttcatgcgattctcctgcctcagcctcctgagtagctgggactataggcgcgcaccaccatgcctagctaattttgttaaaatcaaggtctttcattttatatatcttcaaaatactttgttttaactcaagataaactattctcaaagaaacaatttatctgacatttgtgagatgaacaaagtaaatatgaatgattatgagaagggatgtgatctgcttcacagagcagtctcagaagctaacactgaatgacaacctgtttcatgttgtccacagcctctcctagccagagaggcatcgggcatggtgggtgatgggtggcaggatgagggaaataaagccagactcttggatactgaatcccagggttcagcttatagagcagtggggtactagtcctggtctgtttttccagagctctgatgataaagaaaaaatctctctctagcattaatgtctagaagttaaacataccaagtaaagcagtacaaatatgcaaagcaggttatattctttttaaatctctacgtaatgagaacctgggcttttttttagggagagaaaggttacatttttggttttgatttttatatttttcaaatgacatacgaagggaaagcagagtttgattttagaccaatgcacagctgctgtactgaatgacagtaaggactagttctactctttgataatgtttttggttttagagttgccaaatctttattcagaaattctgaattgtagctggaactgtttaccagctctacattaagcaaagctattttcatggagtgggaaaggggacaggaggaattggtttggctttggttgtagaacataattttaaaacataatatcagttgaattagagcagtgtgatctcaaatttactcctttagtaaaagctcacatctaaacatttttaaatgtagaaaagtgaagtaaacttttcttagtgtttactttgaaaattttattccgtagttgatttaaaagatggattcactcgtctctttgggatgttaatttttttatttccagtggttgatttaaaatttttattttgttatttattgaaatatagttgcctttgctgaaatgatatggctgttgtggtgaaccaaaactagttcgatgggcagaaaatggaagataattcttagatgataatctataagtatttcgtgtaatttgaagaggttggaaatctttttattattctcttagaaaaaggagcattgatagcttgtatttcaaaggggtatgcaagatggcaagtagtgctatttgcttgcacagtggaggcccccaaaatatgtattactttttttttttttccttagctacttctgttgcccaggtgggagtgcagtggtacagtcatagctcagtgtagccttgtactcctgggctcaagtggtcctcctgcctcagcctcctgagtagctaggactaccagtgtgtgccaccacacgtggctaattcttttattttttgtagagatggaggcttgctgtgttgcccaggctgatcttgtacccctaagctcaagcgatcctcctgccttgacctctcaaagcactgggattacaggcgggagccactgcacccagcctgtattacttaatttaacgtatttatttctgtgtaggtataccattgtataattaagcgatgataggaattatttttttgtaacatttatgattaaatattttgtaggacctacagagtgaaaattaagttagataatatactttcaacaaatgaggctatagctaataataaatctccaagcaagatgctccaagagcgttgagtctcttcagctgggtattagctggcaaagttcatgttgaggatacatggtttggttaggcagaacatttcaaattatatcagaaatagttatttttatggttatgacattttgcaggagttcacacattttatgtaagaatctgccatcatcagaatgcagttacaccaaatacttagttgcttgttcatgtggcagctttattttaaaatatcaccattaacttaatggtgagcagattcacaagagaattactttagttagttatttagtttgttattacagatagagttttttattcattctcctcctccgcctcttcctcctcgtcatctttgcctttctcttccacctttgtccagacaactttagtgggaccttttgcgccatcagattttcctttagacttgcagttagcaacatccttctcatacttctccttcagctttgttgcctttgtgatgcaaagctgctttttagtgtcacttaaattactccacctctcacctagcttttttgccacatctccaatagagatgccagggtctgaattcttggggcagaattctgaacagaacaggaagaatctggacagtgaccttttggggacattgaggtcctttttgttttttatttttttgttttgcctcccttagatagtccataatccttcatttctgaatcatagcatattttatctacttttgccatttcatcagatttagacttctctttcccagacattgtcttccacttctcagtgtacttttggacaattttgcaaaaattgacagggatctttgggtttttctgcttaggttctctgtatgcctgcacaaagaaggcataagcaaacatcttgccttttggttttgtggagtagcttttagccaccctgactgaattgttcatgagtctgggcagcacagggcatgacatgtagcttagtgattccccagcctcacgctagctgcctccacaaaaggcacctcaacaggagaattactttaacatcataattactttcagtgtgttttggcataaacttacttgaaatagctgtgtgacccaaattttctgagctatacttagcatgtgatgttaacaatatcctccgatttgcatttaacgtggttaactcctagaaagtgctcacatttttcttttgtagcttattataaatttgtttccatatatatgtatgtgtgtatatacaatcccacacacacatatgtatgtatgtatcgcctttgctttagataattggaattgaaaggactaggaacacccttctgttttccatgactatgatgtgactgttcgtgtaaaagtcctgccttttagttttttgggattgaattttttttaattcttaaaatattttaaagcacacttgttgaagattgctttttaacatttgggttggaaatgtgtacacacagtcattatattctgttaccattttttctttatgggtgaagttgggggcttaaaagttacatttaatattctatttttggacacttccaccagagtctatacacatgtgaaatacatatttttagatgtaaatgtagcacccaacaaatgatactgctgccttggagggaacattttctcggtcctttaagacatccttaacatttttgcatttcttcataattaaaaattctacacgatttatttagaaatacattgatgttttccatcatgaaaataatacattgcatctctgggctgtgttttcagaatttttactgaaaggattcaatatttcagtatgtccagattcttctgttaacgtcaacttttaactgttgagcttaagaactatgcacatcaagatttgactagttataaatgtctaatattattccaagatatgacatcattgtaggcattcttaagaatttctggatattgtttttattgtgttttcatcagatgtggataccaccataaatttttttatgtgactttcttttcctttatttgaaaatagagttcttgatttacatcttctttgaattacttagctaattatagtagctaacgtaattctgctcttaagaactactttctattaggagattactaaatgtaatcaggagtatgcagttaggaatttctttcttattggttttcttgtctttatagtattacattgtgtttaagaagcattttcttaagaaaaacaagtcaaggaaataacttccatgccaaatattatcagcatggtttatggcagtgaagagatccttttaaaagtatttgaacagtttttaggggataggacaaatcaaaatgtgttgcttgtgcctttacattatttattttgtgactatcaatgatcacctagaaaataaaaggaagtctggagttatccagagactgcatctgcagcacattgctacgtatgactcttttaactccctgtttgcccagtgctgtggagggagcccagtgcttgttgtatcctgagcgacctgagcgggagagtctgacatttattatatacccatggaaagtagtctgctgaactactgtggtatcaaagagaaagctagagttacggaggatgcttcttcttattattattattttattttttattatactttaagttctaaggtacatgtgcataacatgcaggtttgttacatatgtatacatgtgccatgttggtgtgctgcacccattaactcatcattcacattaggtatatctcctaatgctatccctcccccatccccctaccctacgaaggccccggtgtgtgatgttccccttcctgtgtccaagtgttctcattgttcaattcccacctatgagtgtgaacatgcggtgtttggttttttgtccttgcgatagtttgctgagaatgatggtttctagtttcgtccatgtccctacaaaggacatgaactcatccttttttatggctgcatagcattccatggtgtatatgtgccacattttcttaatccagtctatcattgatggacatttgggttggttccaagtctttgctgtcgtgaatagtgcctcaataaacatacgtgtgcatgtgtctttatagcagcatgatttatactcctttgggtagatacccagtaatgggatggctgggtcaaatggtatttctagttctagatccttgaggaatcaccacactgtcttcaacaatggttgaactagtttacagtcccaccaacagtgtaaaagtgtttctatttctccacatcctctccatcacctgttgtttcctgactttttaatgattgccattctaactggtgtgagatggtatctcattgtggttttgatttgcatttctctgatggccagtgatgatgagcattttttcatgtgtcttttggctgcataaatgtcttcttttgagaagtatctgttcatatcctttgcccactctttgatggggttgtttttttcttgtaaatttgtttgagttctttgtagattctggatattagccctttgtcagatgagtagattacaaaaattttctcccattttgtaggttgcctgttcactctgacggtagcttctttcgctgtgcagaagctctttagtttaattagatcccatttgtcaattttggcttttgttgccattgcttttggtgttttagacgtgaagtccttgctcatgcctatgtcctgaatggtattgcctaggttttcttctattgtttttatggttttaggtctgacatttaagtctttaatccatcttgaattaatgtttgtataaggtgtaaggaagggatccagtttcacctttctacatatggctatccagtttcacctttctacatatggctagccagttttcccagcaccatttattaaatagggaatcctttccccatttcttgtttttgtcaggtttgtcaaagatcagatagttgtagatgtgtagtattatttttgagggctctattctgttccattggtctatatctctgttttggtaccagtaccatgctgttttggttactgtagccttgtagtatagtttgaagtcaggtagcatgatacctccagctttgttcttctggcttaggattgtcttggcaatgcgggctctttttttggttccatatgaactttaaagtagtttttgaatctgtaaattaccttgggcagtatggccattttcacgatattgattgttcctgtccatgagcatggagcgcttattattttttaaagtatagaaaactttattcattattaattttagagtaatgcatagattcctaatatttgtttcctttatagttgtagattttatatacaataatcttggaacaattatttaagtattaagttcacattaagagaaataaatattaaagacaggaaaaatctagaggtgcaaggattatttcagactttaagaaataaaaatttaaaatttaacattaagatattgtttagttttatttaatggtattgttttattcatcctaatattttcttggaatgaggaataaatggatttactttaggaagagttactgtattttcagaggtgagcacttgctgtcctgtgatcaagtagttggcctgggtgttttctgtcgttggctctccctcaggataatttactgataaaatcttgtaaacaactctttacattcctttaaagagacttgtccttattctgtttaatattcccctcagatagccccagtgttctgatggagtaatgtctatgcatctgatacagtggcaaaaagtgccataaataacagatatgtgtaatggcctggttagcatccaatgttggctcctctgtctttcctaatcacagatcgtggggcagattcatagcagaagtagtcacttttcaatcacgtataacactctgcttaaagattgctgatgtttgaagttgagttggtgtcttagtgtattggagccactgtaacaaactgccatagactggataacttaaataacaaacaatgaattctcataattctggagtctaggaagtccaaaattaggtaccagcaggttcggtgtctgttgagagcccctttcctggttcataaatatccatcctctcttctgggtcctcatgtggcataaggggtgagggagctctctggtggtctcttttataagagtaccaatcccatttatgagggctgcactctcatgacctgaccaccttccaaaggccccaactcctaataccatcacttgggggttaaggtttcagcatataaatggtggcagggacacacacattcagtccaccacattctgccactggccttccaaaatttatgtcattctcacatgcaaaatacattcattccatcccaacagccctaaaagtcttaagttgttttagcatcagctccaaagtcttaagtccaaagtgtcatttaaatgtcgtctaaatctgatatggatgaacctcaaggtacagtttatgctgaggcaaattcctctctagctctgaacctataaaagcaaataagttatgtgcttcaaaaatacagtggtgggacaagtaatggatagacatactcattccaaagggaagaaataggaaagaagaaaggagtaatgcatctaaaataagttgaaaacctaaccgaacaaacaatattaaaccttaggactcaagaataattccctttggcttcgtactctgcttttcaggtccactggggtgggaacatcatctctcagctaggtggaacgtacctcagtggctgtttgccagagccccaccccagaggcactgaggtccttttttggcacttggggcacaccagacctaaagaggcatctaagaggaggcatgtccctctggacatctgctctaggcctggtaaagggcgtctacagaaaaacctatagctaacatatttagtggtgaaaggctgaattgtttttatttaataccaggaacaagacaaggttgcccactcttaccacttctgttactcagcactgtccttaagattatagccagtgcactaagggaagaaaagagtagatagaaaaaagtaactatttgcagaatagtatgatcatttatgtagaaaattcagtatgatatacaaaaaagctactaaaactaataagtgagtttagaaagattgcaagatcagtgtacaaaaataaattgtatttttgaacactaacaatgaaaaataaagttttaaaaaagtttataagaacatcaaaaatacgaagttctcaggaataaatctgacaaaaaatgtgaaagagctatacaatacattgctgagagaaattaaataatacatacacaataggagaggtacaccctttttgccttggtcagaaaactcaagatattctctccaagtttgaaaaatattatcaacattattagtcattcattagggaaatgcaaaattaaaccacaatgagatactgttggtttggctaaaattgaaaagtctgaccataccaaatattgacaaggatatgaaagaacaagagctcttttacactgctggcaggaatgtaaaatgggatatttccaaactttgggaaacagcttggcaatttcttaaaatgttaaatatgtatgtaccatattcagtcattttgctcttagataaatgaaaacatgttcttaccaacactacgcagatgttcatagcagctttatttttaatagctaaggctgaacataattcaaatgcttatcaacaggtaaatgggtaaactgcagtattcatataacgagctatactactaaataaaaaggaatgaactgttggtacatgctacatcacagatgaatctcagaatcattctgagtaaaagaagctaggaaaacagtatacagcttgaataattctatttatataattctagaaaacgccaactatctagtgacagaaagcaaattagtgggtacttggggatggtagtgctggtggtagggaggggtggaaggaaaggatcaaaacagaatcatttggaagtgatagatatgctccttatcttggttgtggcagtggtttcaggagtgtttatgtatatcagaacttatccagtggaatactttatgtgcaatttcttatgtgtcagctgtactacaataaaaataaatgaaaactgtctttactgtctgatcactgcagctaacaaatctaggactacttgctaaatttacccaatcttaagacccaccaaggacttttgtttaaagggatgtgatccaggcctgtcatggtggctcatgcctataattccagcactttgggaggccacggctggtggatcacttgaaaccaggagttcgagaccagcctggccaacatggtaaaaccccatttctgctaaaaatgcaaataaataattaattaaataaaataatgtgatccaggcttcagaattattaagataggacagaggaactggactttttagcaagcaccccagataattcttctccttcttataaaacacttaacccaggttcatttaattgcactttggtaatctgcagccatgtctttatgtgagaaagggatattaggtttctaatatgaacagaaaggcctagccatggaccacctgatgatgcttccactgtggtcagataagataatttacaattgaatggaattattttcctttcagtttatagtttactgaagtgagccttgcattgtaagttcctgaagtaatcactggaaatgtcttaattcagtagctccatctttagttaatgctgcactaaaagaaaaaaggaattttacttacatactttttgacaagtcacattcatatatgttttagtggaaaaactgttttacatcttatatatagaagctgtaaaataacatgttctggggagaggaataagatgaatagaataacattataattatctaaatgttctttaaatggagatagccacaatctttcgtaaaactctggaaagaacagcatgaccttcttattgccccctttccaccgacgtcaaacagaaggaaattatagaataagtctgtctaaattttaaatggttcagttatcggaagaccttagagagcaagttttccacaaatcatctctgcgccattttgtcttgattatttttttaagggttggtttgccaacatgtaattaatcacttttgttagtttttaaggaaatgaaactgcattgttccctttggcttgactgttcttttttatggcgtcttttagtgttgtagttgtaatatgaaaaccttaggtaaatgttgggcagtaatgtgaacaaaacagtgggaagggagtaatttttaaaagcttatctacattgctgctgtaatacttacattcaactccagatctcaaataccaccaactttaatatcaaagtcccttaaagtcagaaggtgttataatgtcagtggatggggttattccctgtgtacaaagagtcaggatgcacttgtcaccaattcccatggtttcttcttccaaaatctagtttgaatggatcatttcatctctggaggaagggatgggagcacccttccgaccagtttcatttctttgggctctgttccatctgtgcagggaactaccttctctatggaaattggacacgattttaaaaataaagcattgcatttactaatgactgtcagtattaagatttcatgtagatcttgttgcttctcagaaaaaagtttcatatacagtaaggttttaaagataggcaaataactagttgtgagcaggcaccatcctttaacttttattaatttgaaatcatttttccatttttaagcagaatagaatgtcccagtaggtgtaagggaaatttcagtagcctccaagactctgtggagattttgaaactatacacgcttctccatctgtcgcctgccccctcctcccagagcatagacttcaaggctggactttgctccatgttaatgatcactgttaatgaaaaagataataggttccaaaaggctgaccacctgtttttggtatttagggtaatgctgctgtcaaagtgaatgagatatattccttcctctgtgttctgaaagtttacgtagggttgggtgtgtaatgggttgaattgtgtcctgcgtctccaccaaaaaaaaaaaaaaaatggttgaagccctaacccccagtacctcagaatgtgaccttatttggaaatagggtcattgcagatgtaacgttaagatgaggtcatactcaatgagtatgagctctaatccaccctaagaaaagagacacacacatgaggagaaaatgtcacgtgaagatagaggcagggactgcagggctgcagctgcaaaccaagacacaccaggggcttccggcaaccacaggaagctgggaataggcaaggaaagattccccctacaggtttccggggaagcacagccacgctgacacattgatttggacttctagctatcagagcagtgggacaataaatttctgttgtttaaactactcgtttgtggtatgttattatggtagccctagaaaactaatacagatttatattttctttcaagtttgatagaattcaccaaacagtgttgagttttctttgtggaaaggttttgaattgtgaattcagtatctttaatagatgtagggctatatagatgttctgtttactcctgtgtctgttttggtaatttgtattttaagaaatttgtttatttcatttaagttgctgaatttattggcataaaattggattgttcataatattttttgatgtcttaaaggatggtgttccctcctttatttctgatattttaaattttttgttgttgttcagtctaacacagtggttcttaactgggacagttttgctctggctaaggacatttgtctgtgccaagggacatttggctatgtccggaggcattttgggttgtcacagcttggaggatgtgctactatcatctagtgggtagagcccagggagaatgctaaacatcctacaatgcacaggacagcttctcacagcaaagaatcctccagcccacaatatcagtagtgctgaggttaaaaaacctactctaggctttatagtgtaaaccttctattttccaaaaatattatatcatttcatgtttaatatagtgtttccattcatccccttccagtcttcaaactggttgtgggcataccttttacttctctgtatattataaaccccacgatatattgttagctgtttttgctttaaatagtctgtcaaggaaattttaacataagagaatatgttcagttgttactaatatattttcagcactctgtattctttgtgttgactcagatttccatgtggtatattttctttccacatgaagaactgctttcatacatcttacaggtctgctggaaacatagtctctctgcttttatttgtctgaaaaactctgtatttatcttcattgttgaagtatattttggctctatatagaactttccatgacagtttttaatttttttttctttctttgagacagagtctcgctttgttgcccaggctggagtgcagtggcgcgatctcggctcaccgcaacctccgcctcccgggtttaagcgattctcctgcttcagcctcccgagtagctgggattacaggcatgcgccaccatgcccagataattttgtatttttagtagagatggggtttctctatgttggtcatggctgatcttgaactcctgacctcagataatcctcccaaagtgctgggattacaggtgtgagccaccgtgcctggccctaaaatattttaaaatatgtcatttcattgttttcttgtttgcatagattctggggggaaatgtagctattgttcactattataaggcttttaaaaaaatctgtgtattttacaaagtattttgggattttgttgttattgaaaaataataacctaaaatttaatgcaacatgtttagattttacaaacagacttgtatttgacttgcgtttggtatttctcttttttccttttctttttttcacttttttctcttttactcattaaaatatgtattttggggcaagctatttctctgagcctcagttttctcacctgtaaaattgagctaccaatgattctcacaggtttattgaggaaattaaatgtattgaaggatgcaaaatgatttgaatttgtaggtactcataaacctgatactacagtacacaggtatccccctcctcatccaagttcagttgttctgacctcagggttcacacttggcggcagatcagtggatgtaccggatctgagtccttcccagccatgtggcagcagctctgtgtagagacgttgcctgccccccgccccctgcacgctctccaggagccaagtacagccaggaattggccaaaatggagagccccgaacggaccatgaatggacactgttgccactgtttactattcctgttcctttctgtagtttacctgctgattttaaataaacctgattgcttactcaagcaaggttggaagtttttttaatcctttaatttaaaactttaaatacagtaaaaatccatgacttcttatatttcccctcatttgcgtatttcacttaggatgctcttccctttaattaaactaaaattctgttcattttccacttctcaattatgcagactagctataatatttaaagttacaaattctcatattagaagaatcttggacataattcataatacgtagcttgtaatcaacagtaaactattacttccaatggatctaattacttagaatttataatactaatattggatgcactcttttttatcttagcaagggaaactaactgtgtatgatagacatttttttgtaaataacatttcgcttttccaaagcatgagttgagctgttattttttgtcctgtagctggctgtgggcgctagccccctgactgttgttttaaatgtcccctcattgtgcttctgctcctttactagtgggcctttggagtgacgctgtgggaactcatgactctgggccagactccctacgtggacattgaccccttcgagatggccgcatacctgaaagatggttaccgaatagcccagccaatcaactgtcctgatgaattgtgagtttttttgagcttgaaggcatgagttttattccatttactatattggaataaaggaaaaagagcaggtttccatattcacacagagccttcccttttgagaataatgactctttggatttaaattagactcttataaaaaaccacaaagtcagggagattcgttcactctttcatgcatttgatattagaacgtcttgcattttattttatagtgcataatctaagcactataaattagtctgagaggacgtactaagaaaattgaatgctacgtcagttattctatataaagtgagtatctgacttttatagttataaagtagttataaaggacatagtagttataaaaaacctctctcgttgtcattttgccttgccagttagtatcagctaatacagggaagatgatctggactagtaagccaaatagttgctttctgtttcctgcttctatcacatagcttatcttgccatgtaatgagaatgggataaacaggaggctatgcagggtgattgatcgtacagatgagtatattctcagttccagaacctcctgaaggtttctgcaccatgacaaggtggcagcttttgtactgattttactctagatccagggttcatagaacttagataaaactttctcttcctccaagttcttttcttaatttaactacaggaaaacacacattctttttttactgtgttttaggtttttacatgaaatctctgtatttgctgaaatattttgatatgttgtcatgaagaattgaaattcacacataatccaaataatttcttttagcttctttctagagctgccaacagatagtaaaatggatccgtttttaatatatcatcctctccatacccacctttagacaggcaacataactggcatcaaactgagcaaaagttatgaatactgtatccttactagcccaaattttcatttttgtcactctgcagatttgctgtgatggcctgttgctgggccttagatccagaggagaggcccaagtttcagcagctggtacagtgcctaacagagtttcatgcagccctgggggcctacgtctgactcctctccaatcccacaccatcaggaagaaggtgcctgtcggggctcacttgaagcctgtcagggatgctttgtatctaacacaacgccaacagaagcacatttgtcttccagaacaccgtgccttagaaatgctttagaatctgaactttttaagacagacttaataatgtggcatattttctagatatcacttttattaggttgaactgaaagggtttttgtaaattttttggccaaaattttttaaaacatacttactttggactaggggtacattcttacaaaataaataaacagtttttaaaattgtttagacacagatatttggaattagctatcttagtgccaactgctttttatttttttacttcatcaaggtgatgtaagtgactcacctttaaagtttttttagtgttattttttatcactactctgggaaatggtttgtcttcaagatgcaatacttttcttagtaaaggaaaaacagcataaaaagatacctggtctgccttgtacaagaaaaggcaatattagaggaagaaaatttaaagaaaagctagaggaaaaaaaaatttttttaaaaatacttattagaagcaaactgcccttgcatggaaaactgtttatttttttcagtgaaaaggaattctgctttcgtgtttttgggaaagcaggaactgagttcattacatctttaatttggcagaaattagcctttctgtgaaccagatgtggtttggggcagatctgtagtaaacaatggtgattttatttatttttactctctggaaaaggagataatacaattccagaaagtgaactcatatttctaaggttaagattcccttttattgcacctagaatagtgctatgcacagagcgggtgcttgagttgttgtcgttttttgtttgttttttaaatgtaaactggtaaattttgtgcttatcttcaaggctggcttaagtataaaattgttttttaaacacttgaaaaattaaaggatttgttttatattatgacagtattgaaattatttttcataatgaatgattggttattgtgtctggtaagtctttgaacattcaacagccagacatttgtgttttatttcatgatgttccagtcaagttccaaagccctaacacagttaagctggctcagactccaggttctagtaaaaagttggaattaatgttataaggaagtattaaaacactgaaacatttctccagaaccagcaagtaagggatatgtatgtatttatgctcagttttagttggcctaaagcagagttgaatgggctttctaaatagctaggcctgcaggtacctgccactactcccatcttcagaggtatataagggagaatgtgtagcagttggaggcttttgctgtttttaaaaaagccttatgaatcagcagcacatcgggaaaaatagctcacatagtacctggttttccacaagtaagccaagggcatgattttctgtgtacatttattaacagttctttggttttatgaaatactcatatgaagccagtccctggagtactgttttttaaaaggtccctttgaaccatttgtaaattatattttcattcataacctgcattcttagaaggcattcagtcaacatttacagcacttactgtgtattttccacatggagtggttcaactcaagcgtcccttccagtattcagggcattcttatttcatgttcaagtgagtgcattgtttagaaatcacagtttattaacatgtacatgatctattttaaaaaaaaaataagtactgacacctgacttctactcccaattagcagattgtaagaaatgtcctcagtttggtggatggtgtggtgcctgtaaccttatctttttgtgtttgtgagcacttttattttatgtatgtatttttattgtagtagatttttcttggtgagctacttggagtctttgacatgggaaggaaagagcagttataagatctccctgactcatgttcttccagtagttttattgtagattgtgaatgttactgaagttttacattttactgattttgcagaaaatataatttttatggaaaagaagcaaattgacaaagcagtgttgtggtattataagctggctctggtgacctagagatgcattctattctgttttttcttgtaatcctcctgttctagaaattttttttttttttattgatagagggaggattgggttgctcattcagtatatatttattgagtgcccactgtatcctggctctcgggataatgcagggaacaagatagatgaggttcttccctttctagattttgcattctagttaagaaaaacaggtaatgaacataaataagattttggtaagtgctatgatagaaataatagagtgatattagagagtgtaactttagatgtcataattagccaagcttctctaagcaggtggcatttgaattgtgatctgaatggcaagaagcagccagccatgagaacacagaggcagaaggcacataattgcagaagccttaaagcagaagcaagctggcctccaatctcagccgttccccttcattctctagctgctgctgctgttggaaaaagagaaaggtagctagcgtggctagaatgtagttagggaagggagtggtacaaagaagcaggtctttgtaagctgtggcatacatttatattttttgctgaatacaatgggaattcatttgaggatttttcaagtaagtagcgatatgatctgatttgtcattttgaaaaggttgtgccatctcctctgtgaagactggattgtgagaattcaaaggaagaagtaatgagaccctttaagaagccgttgcatagttcagaaaagaaaagatagtggtttggaccactttgagtagtgaggagatacagagagaaggggcagattggagatatgttttgaagatacaccaggacctggatccattggatgttgacggtggggtgaagaaggaagcggggaggtgaggaatgactaattgatttggggcttgagcatctggttttatggccaagctatatactgagatggggaaaaatctaggagaaactgaattttgcattggccagagaaatccataatttggtgtagactgtgtttgagatgccagttgatcatctgtatggagatttttgatagatgagagtctgcagctcagggaaggtctcattgaacatacaaatgtaggagtatagcatatagactatttttaaagccatggtactggatggagttgatagggagagagtgtatagatggagaggaggtcctaggactgagtcttgagcattctaaccttcagttccagctagtgaagaaagaagagataacaaagacaggaaaagccactgtaattgataaaagcaacaacaaaaaagtgaaaatgaggtgttgcaggagcccaagaaaggtcgtgtttcaaaatggagacgcctccatcagatttggcaatatggagttaactggcaggagcatggggactggagcaagtcgaagtgtggacacaggtggggacgtaaaggcctaccactgtcagccctgctgtgaagggaaatgaagcaataactagaggagatcaaagggggtttttcgggagaagagggacagggatgagagtgttttccagatgaaggtacagtgccagaaaatgtttcatgggctcatgggaatgatccggtagagggagaaaaatccctctggggtatgggccactgctcttccttgccatttggtccacaaccatgaaagcctttcactctggccccgagcccttttgttgtataagggttgtgtgtttactgggggagaaatgtgagggaggtaaggtaagggaggcggtacacaaaactgccaccgtcccattacccaacagcctgcctctgttgaggggctttcctgggacttcagactggcaccctcattgtgcttgcagctgtcatgtttccttgcccagattgcccatagctgcttccctggcctcggccttgaacccctctagccagcaactgcccaggtaacactttataaaactgagccgctgtccctgcttggagccttcagagtagacttcagacctaggcagagtatccactcagctctgccgtttctcctgctccccacttcgggcctgcacgcttcccgccgctcggcatgctccttccccttctccgagaatgacgtgctccccgcactccccacactgccgccttgggaccaagaaggtgcctctcacaccttactgctctcctccaggcttcgtggttgcttttcagcctttttccctggatttgaactttaacaaaggtaagatggaggtttatttttcaccacttggctgtgagttccttgaggataggaacttgtgttttactcagatctgaatctccattgctttagtggtgtgctcaatacatggtaggggtgaatatttaatgaatgaatgagtgaaaatatctaaattttgcacaggagagcaattagagaggcttaaacaggaaggaagtcttctaattccttaaaagcattatctcatatttgaagagttcaagtttgatgcaacataaactgataaagtttgaaataaaaagagacaggttggtaggaaagaccattcatatcctatccccaaactggcttaagtccactcccactgcccccagctaccacctttttactttattctacctgctatttctttggccaccggaataataagcctgatgtaaattctgtttcatactcccacaggtcaactttttttggagtttgacaataattattccaagtcaagtaattcattgattttagtggaagattgttttccaggtgttattcttccatgcgcctcacccccatctcataaagtagaaaagagatgatttaatttatgggtctagaaaataaaaatgtaaatacttgcttgttaaattaatttttttctaccttcatttttacctttaatatttcaagataatattggacttaattctctgagacacacaaacatcctgcataagtatattgacaacatacattttatatgtaagtgaaccatatgggtgagcctctgctttctccctgacagcgctgttctttaagaaattaaggctaaccaggtctataggttttaatgggagatgtctcctaacttttcaaagaccagatgttcttgttatactgataaaaacttattaaaaaaaaaaagaaatagggattgatgatgttcaacattattctctttgaacaaatacatcatttgttcatacttggtttctcagtatttcaacaataaagcatgttttaatgatttgtctttagaggagtgagcactcctctgggggtatattacaactgggaaaaaaaatatagtttgaaaataaaataactgtttacccttaaagaaattaactctatggtgccttaaggttacatttgcaataaacttttttacatctttctgagtctttttttgctttttgccttcttggctctgagaataagcataggctgatattagataggtttgtatcattagggatagcatttagctgcaagtaatggaaaaattcaaccataatcacttaaccaaaggcaggtcatttttctcccataacagctccagagagagataaaccaatgctaatgcagtgatcccagggtgtcatccattgccagtctcctcctgttttgctgctctgccgtctttagcatgctgtggttcttagggaccccaagggcctagagcttgttccagataggaagatgagcaagggcaaaaagcaagaggcatgagttactgagtcctttttgtgaggaaactactaacttcctgtagtatgcttccaccaacaacttaatatcctgaacgcacatgagcactccatgcgctacaggtgggtaatgccaggaaattagattttgttattttttgaaaacagctttattgagatataattctagtatcacccatttaaagcgtgtaattctcagtgatttttagtgtagtcacagagttgtataatcatcgccacaatctaattcatttttattaccctaaaaagaaaccccatacccattagcagtcactcccaattccaccctcaccctcagctctaggcaaccacgaatctactttttgtctgtatagatttgcctgttctggaccattcatataaacggaatcacacaacatgtggtcttttgtgtttggcttcttacatttaacataggattttcaaaattccttcatgtatcatgtatcagtacttcattcttttttattactgacagatattccattgtatggatataaaccattcatcagttaatgcatattggaggaaattgagttttgagttgatcacgttcttgttgtatacaaaattgggcttctattggtaaggaaggcgatggctcttgaggaacggctagcagtgtctgccgctttgcagaaatgtgctggtatttggcttcctttagcaatatatttaatgcttcaaaagttctgtcaaagtacagtgattgtgaagagtcttagtgactgtagggagtgtccagtcagcttggtgtttaagttggtgagtcctgccattatttgagatgaaagcctggtaggaattactacctcacctttagcttctaagtctttgaccagaaaactctactgctgtattccattgtgaatgctgttactttggcctctggcccactgttttccacctgttcataattctgccaccaccttatagatttgagcttgcaaagttatattttcttcaatatttggcgtacagtatctaccaccaggtacctttttgctagcttcatgatctgactatttagggcctttagacgtaagccagagactggctgtgtgtgtccattgaaagtcttattaaaagagcttaaaaaatatttaatgatctattacatagatttattgtactatatttcatatgcctttatttagacaatacttgcattcctactaggttttttgactttttaattgatactatttggtcatagcattacttaataggcatctgaagaacactttagacattgcctaatttagagaacaggataccgtcctggagactctatgacgaattggttgtgggccctcattctagaaaaacactggaattaatatcctgaaaaaagttcctctagcccaatgtggttcaagccagaataggtttgacttacccataatctctttatcaggaagtgcagtgcttgataaatctgtgttcaagttttgtgttgggatctctaagcagtgtccctctggcctttgctcttccccctgtcccagtcctcagaacggcccacagataactaagcttaaaggataggggcagctttatgtgacctgacaagcattcttggccagctgagcagacttgtcttgtggtaagtactcccttagggtccttctcacctcttctgggaaggcaggaagaggaagagacaggagcttggcactgccgggcttcatggaaacctggactggctcccactgaggggcttccccttctccattttcctctgtgtccactctggaccttttattctttagtgtccctctgttgccagcctcaccttctggctcttgtccttatgtccctcttaaaggaacttcattccctttccacagggtgtagtacttcaagtgcatttaaacaatgtattaagacttaaagtagatatgaagattagttttttccacagccaccttagcagggcatcacatttttgagatgaaaggaggattacctgttttattttacaaataaggaaactgaattctgtatcacttcctagatacgagattgaaaataggccttttttcatgttggcatgtttttaggaggtagttggaattccccaggaagggaaattaatttgttgagtacttaccagcactccaatagtgggcattttaatatatgtctgtcaaataagtggaagttgataatagatttgtggagagtttggtagtattggagcatagtgtttaaagcagagggtggcagaagattcgaagagtaaatggcagatgctgtgagagcctaacacgttaagactttgttctggaggctttgtagattcagtaaaaggctttcatcaggtagtgatgcagtcacatttgtgttagcaatgatagtagcaggtggtcattgcctactatacagccttgtactgattgctgtacatgcatgatctcatttaatcttgacaacaattgttactaatttccattttacagttgaggaaatggaggttgagatagattgcacaggtcatagtggagctgtgattctcatctagggagtctgaccagagcacgcacaggacacctgtacagttgggatgagaggaaagaattgaaggatgtgttaggagagcctacttggtggtctcaacatttaatgacataagagacggtattgttggttcagagtgagaggtgttggataggagtctgtaagcatcataagagtgtgaaggtttctctaagggaaatctgaaagggagctgaccaagagcagtgcaagtgaggtcagctgaggttagagacaggaatttatagcagtactgccctgactggttatggcatttttctccgtgaatttggctgcaatagaatctgctgtaatacagagtggattaaataagatgaatgttctgtctcttatatgagagtccaaagggaggagagtggcccaggctggtggtgtggttcatgttcagaaacattcaagatcccagttcccttccatcttgtcctgccatcccataggccatgttaatgtggctgcatggccaatgctgagtctctaccacatctcagcttctgggagggggcaggagcagaagtgaaaagcaagttaattccttttagacaaataacagagatgttgtacacatcacctttgctcacattttattgtcaagaatttaggcacctagatgcaaggacctctgagaaaggagtctagctggcatccaggttcccaactaaaactattactatggaagacgaagataatggatttgaggggccagctaattgtctgctacaaaagagaaggctggctgtggggttaatgcaggattggagtttttctggacaggtgtgaggatagtggggcaagagagttttagggtgttggtgagatgtagttcaggtggatagccatgagctccggctgggcgtggtagttaggtcaggagattgaggacctggaaccctgcagagtagatgtgggactaagggagaaagtggttggaatgggattagtcatttgtggctagagtaggatctgggttgaagtccagaggtggcagagttctgagagatgaaacacctggagtgaagccatggtttgggaaaccaaccatggtgagctggaggtttccagagttgaagcaggcacagagcatgtttggtgttcctgcacagcagtcacactgcctacacacatactctattctcatcatatacttgtaccacactccacttcgtgtccatctgggtatctcctcctcacctacaaaacccacctcccacaaagctgttcttgatccctaggctcttaaagtctccactctgtttctctggctatcagctggcatctttctctgcttctttgtagtttgtaacttaagcttacatatggccagttgtattagggttctctagagggacagaactaataggagatatatatatatccttttatatacatatatatatacatatatatatgtatataaaaaggggagtttgttaagtattaactcacatgatcacaaggtcccagtaggccgtctgcaagctgagaagcaaggaaagccagtccgagtcccaaaactgaagaacttggagtccagtgttcgagggcaggaagcatccagcaggggaggaagatgtaggatgggaggctaggcccatctagtctagtcttttcacgttttttttttctacctgctttatattctagccacgctggcagctgattagatggtgcccacccacattaagggtgagtctgcctttcccagcccactgattcaaatgttaatctcctttggcaacaccctcacagacacacccaggatcaatactttgcatccttctatccaatcaagttgacactcaatattaacgatcacaccagttccggcctttctaagccactacatatacaccacatatctgctgcaacctggcagttgctgtgcttattttcacaccaaattcccaagacaggcaatctgattggccccactcatcacatcttttcacactggaccatagctagcaggtcacttgcaggacagaatgggcagatggctgctaacccagctgctccccatgttgggttcaatgccaagcctatgaccctgtgggtgcagaggcgcaaaggagtacagcactatcgttgctttatctttctgccagcccttgggtgtgggaggggtttttagagagatgcaagttggctgtgtctccttgccactcaggaacagtgagtttatactacaccaaaagggatttgatcagctggttgagaattcagtcatcggtctgttcattaaactagaacagttgagctctgccaggccctgggaatgaagaagccaaggaggccatcctgtcctcactgtctggtgagggtggcggggaggagtaaggtggtggtttggggtatataaccagccagttacggcacagtgtatgtgggaagagaggctctgaagctgtggccacccccagggtttgagccccagagagccttccccaaagggctggtaaaacctaggaagcctaagcacatggggatcccgtccagaaacacaggtgatccctggacgggaggcagccccctgccctaagagggaactgcctgagctgctgcctctaggacaggagtgctgctagagtttgtgtgttagtaacaggacatgcatggccgtctgttcatgcaagtggccatcacgtctgtccttgggtatggctttctcattggacacaatagtatggtgagagattgcatctctgaacctcatactaccctggtctcagggtgtgactgcagctttgcacacaccctggagtgagcctcagcctgagagtaaggaaatcacttctggcatcaactggataagttttattttattaaaactttttttgcaaagcccagtcttttaatccaagaatcagttttttggaaaacaaatgctttatttcccagaggtgaaaacaaaaaaaaagctcctgtggaaaactgcatcatactaggtcagggaaagagatttcttttttcaggttagtgagagaggtctggccagtccttcagatccagatggctatcattgcttccagggcaggagctgggagatagggggctgggacaaacatggtcccaccagcatgggcctcctagagccaccccagaactgggctcagacctcggccccgaatctctcagggaagtccctgcagagactgaacctgagaagtggcccctctcatgcctccatcctgtcgttcagaggccctgttcacattccatcccctctcaggaaagcagacatctgctctcttccctgagatttcccaggcttggagaaaacacactcggatatcacacgctcacctagtgcacttcttattcagaagcctctcgtccagatgacaacatccaatgccactggtatgacaccagccttgttttctttctctcaccccgtactaaatccactacttataaatttgcctccgcatctccgtcttctcttcactccatctccatccctctggaccacacaacccttcctcatagggctgcctccagcctccccaactctagcctattctcacagctgtcagagccatcccatcatggggggatccaagggcctgtctgggtcatcacagtgggcaagaatggcacagcttgactctccaggatagctagaaactcccacaaggctgggcaggaattccaggaggaattgcacaggaaacatcacctcactgccctggaagttgtgggtgaggggaggaagcctcagaaacaaaccaagaagccagaaggactcactgggctgggggctgtcgggagtgttcccagaaaagccgccactagctgagtggttgcctctgtagacctcaaggtctccacggctctagaaaaaggagggctggccccagcgtgacctcaggttcattttctaagcagcaggtaaggccaggggccctcttgagtttgtgatgtggtctgtccagttggtatccaatcccacagacgctcatcactgtcgtccttgtcctctccctcaccctctcaccctgcctggccccctcatcctctcctctcaccctcaccctccttttctgactctccccctgtgcctctttaaccctgccttgtctcagctctagtcagcagctccaaatctatccagggctcctagtcagcctgcccctatttcagaagaatgttctcatccctgtgtccctcctgtgaatactactgtccccttccaccctggattccccagaccttgttctatttatggtcttttccatctgtgattttcccatttttggtcactctcttcttgtctacatgtgagtggggccgtgagggccccctgccctccactcccctgacctggggccagtgccctcactttctggagctgctccctctgcaggctccagactacagctaccagattcagtgaccttttctcagtcatcctcctgactgccgaccacatcaccctgcttaaaaccctctcttccttcaacgcttctctcttggggcttttcttcttctcactttatgcacaggcttccacctctctcccactccccaaaatatcaggggtttctaaggttcctgtcccagtcttctccctcacatctgtccctcagtgactccatctgtgctcagatacctgctctgtccccagcaccccatacctggtcactggtccaggacctctggacatctctttctgacattgtccccctggatgtcacagagccacctcagctaaactcatcctctcccttcccggccctctaccaggaccacccaggaagccacctccactccttgcgttgtttttcctgagtcatccaggggtagagcttagggtctctctgacaagctctgtccagcccctaatcctcttgagagtgcctgcagggttgatggggccagcctttcctaccctctccactccctttcccagacattgtcagtaacatcctgtttgggcctcctgtccccattttcctcgatgctacactgcctgccagagttaccttcattttcctgttttgaatatcactcaagcatttatttcagacattcataatactgtcatgagaaaggttttccttcaacaagtgtggatgcataaaatcatgtgaaaaagactgggttttttgtttgtttgttttttgcctattttatgttgtaagctccccaagggaagacggaccactccacccgcttctttgtgacttcctgtagcacttaggctttactaaatatgatgatttctgggagtgagagagtacttctactgaccaaagaaagctaatcctaccatagcttacccagaaatatatatatggaattcattattcaaagagttcctactgacagaaaaaacctaaatgcattcaaaagacttggagaaagatctgccagagacagggttggtttctaagacacatattcccaaaagaaatacagacatggacacatatccttaatgtttacatacagggcgagatggccatgtgttgggagttttcacaccagccccatggatggagtgcctttccaccagctggagtgcctttcccccagctgtgtccccatggcagtgcacaggcttgtagtgtttatttactcaacctacacttacgcatgtacatgatccagccagagtcccagagttgcttttctagtggtggtaacaacttcagcccaatggccttgacctctggacccagaggtcacagggcactggctggggttgggctgcagcctgtgaccatgagccactaaggaagtaacccgcgaactaattgccacctccttactctatttcgccagcacgaacatcacctagagtgtcattatgaaggtctgacactgttggctgtcctaccatgaaagggaggtaccaacaactgtgaaggtgatttcatgacaaatgacacttctcttattctttcccaccttgggaattaggttccttgatttatttttaagtttaaaaaatttttttgcggtaaaattataaagtacacagtgccgttgttaaaaatacactgtcttatctaggcacaggataccaggaagttgcgctgaaagtgtttttgaagatctaaggaaaatattattttataactagcacattgctacaattagcatttgattcacttcctgttgtctaagagaaaatgtcaagctgtgggtttagaatcagagtttattgttgggttaattaaagtctaacaataagagagagaaaacaaatatttttgaaagctaatattgttccttcctattttatcttccatatctcataacctcttttttaaaaatatttttcttctttttaactttctgtactgcattctaggtgtactttttccaacctaccttctgatttttcagttttttttttcagttttgtctttctactgtttaatgcatttgggtttaaagttcaatgtctatatttttcattactaaaagttttcttttaaaacttatctttttaatcccagtaattgcttttgtttttatagcatttattgtttctttaatcattgtaaacaggctttttaagtcatctaagtctgttaattacatttcttaaagttcttaaaattctttttttttttttttttttttttgagacggagtctcactctgttgcccaggctggggtgcagtggtg

SEQ ID NO: 307 - DNA, 126595 bp, Homo sapiens
gaattttggaggaatcaagtaggtataaaaatcaaatgcttccacttttgctcatgaaaagatatttcactaaattattgcaaactataaatcctttatgaaagaaaatttccctgaatctgaaaaatagagcacataaataaagaactaaccattcttgtctccttatgtaagcactagggaaaaaaatcaactttatcaattatcaactacttaatttcatgtaattaattttgctgttgttttgctcaattttgattagcagttccaggaaaagcaattttggactataaatggttgcaaatgcttccagagaaaaattgaaaacaataactgtgggtaacaaaaacctagaacagccaagctcaaacatctgacagaagtccacagtggacaaggaaatttagttatatttgtgtatataaaaatttaacataatagcctaatcatgactgatagtacatgtcatgacatatcagagttttagaactctcacacaattttggaacatattttaataccacatgtatacaaatataacttaaaggaagttgaacatcatttcttaattgataatgcttcccctatgatttctcaataagcctaatcatttaatctttatgcaagatgagagatacattctttgaggctctccaggagcccacgtggaaaatcccaaagttaattttaggccaaaaagatttaattttggattttgatgcaggggaaatctaccaaagatgtcaaaaagtctaaggtacttgattgaacagaatcataggtcactgctaaataatagttattcatttaactagagcggtaatcaaaagacttcaaaagcactacagaaagttacatggatgtaaaaaccttaatccttttaaagttcaattttcctaaatatcaaaaactcaataaagataacatgaaacacaggaaattatcttggtaaagcatagaatctttgtttcctaggccagttacctaaaaggcaaagaaaaaagaaaaccgcctgtagtgtgattgcttttatttatacaatgttcctttagataacttgtaagttaagcctaacaaaaagaggacttgaatttaatcaggcacaggataagttcatccagggttatgaatgtactttatgttatagagaaatgtaagcaagaaaactggcaccttgcacaggagaatgtctggcttttagtaatgacataggaaatttcctggttacatgaaacaattaagacttatcaggaaaagtcaaaagtacagaatcaggccgggcatggcagctcatgcctataatcgcagcactttggaaggccaaggcaggtggatcacctgaggtcaggagttcaagaccagcctctccaacatggtgaaactccatctctactaacagtacaaaaattagctaggcatggtggcaggcacctgtaataccagctactcaggaggctgaggcatgagaattgcttgaacctgggaggcagaggttgcagtgagccaagatcacaccactgcattccagcctgggcagcagagcgagtctgcatctcaaaaaaaagtacagaatcaagttgtactgtaggaaacactgctttcctagaccttcaagataaacacttatacaaaaattagctgggcatggtggcatatgcctataatgccagctactcaggaggctgaggcaggagaatcacttgaactcaggaggtgaaggttgcagtgagccaagattgcgccactgcactccagcctgggtgacagagcaagtctctgtctcaaaaaaaaaaaaaagatgaacactttagtgacaaattgtaatggctgtgctaaaaccagggaaaaagttacaggacttggcaaaaatgttgaaggagagggtaatcaacccagccaagcaaaaagatagaccttttcaagggtagaaaggagagttgcatttccaacctgaaactagggaaatttgatagagctcaggaagaaatgtggcagaaatagaaactgtttgtagtttagaggattactgctaagaaactgatttcagaaccaaaaatcaaaacttcttacaattttattaaaagcaaatcaacattttatgaaacacctcattgttctaacataggggaccaacattttaagttctgtattagtgtgtttttaacatcaaagttcgatctctagaaaggctcatacacaagttccttccaattgtaactcacttgatcacacagaaaattccttttataaattgtcttttcacaacattatcatgattcacttagatcattaacaacatgcttggactttctggtttgtcccatacttcctctttcatgaataatcagtcatttaatctagaatggaaatttaccacccaagattttttctcacataaattattttcttttcttttcttttctttttctttttcttttttcttttcttgtcttttctctttcttaccaaatatacatcttaccctccttatacgcttgcacacagaatagtctttctcatcaatagtggtttaatcacatacattaattacaatgttaactcttggtgaccctaattttcggtaaaaacctagaaagcaagcagcttttaactatcaatcatgtaccaacaatccaagaatatacattttacaatttccaggaacacatgctttctaacagaaccgactctttaatatggaacaggatatttttactagaagatccacttacgtttctcagaaataagaagccaaaagtatatgaacctaaacccataatattcagcagtaaatgtctcagcattacatcttatctgaaaatgatctagacattcaatgtatatccatcatttaatttagcttagcaaaccctaaggatatcattactaaagacatttgagaaatcttcttaagtaaacatataaaacataaccattatccacaattcatttatgaacttttatttcatttatatccatccaattcattcgcttttaaaaattatatttggaaaacttcatgacacactagacaaatctagctaccatcttaagctaaattttttcatcagcaaaatttacattattgcatgccaggcaagtatcataaaagcaagaaccctaaagttaaatacatgcatatttttctaataactcagaagacatagtgattcccaccaaaccaacaatattagactagtcccacccaccaaaagactactaagttacatgaacttgaaaagcatttgggcttatttgcttaatttacgagtacccattcatttataaaccaatttggtggcatagacaatatacaaacagatatgtttacacatatatacacaaaaatacaaaaaggcgcaaagattttacagcttaattttaaaactcactagtttaaaaggacagttggattcaaaactgtgtttctgtaaatgtaataggctgaaatttatctgtcccccgtggccaaagcctttaccgaatttcagataaaacagcgtataaatttgtatctcaagcacagagagaatttaagttttctcaagaaggagtttgggtgtgctagaggaggattaaaatgcatgccaaggtgacataaatcataggaatttatcacacaatgttacaaagaaacatgcagatgagcctagagaaaatgtaggaaccttttcaagataaccagctgaaagagtgaaagaggaaggagggagtgaacaatagaccagagacggtgaaaaaggtgcagaagtcaggcagaggtgggcaagggggctagtggaataagggtctttcaaaggtgttttaacagttttaatttcaatcttgcaagcactatctctttctgtttcattaaggcactcattcagttgggaattatttctctaagggaggcaatggtagcctcttgattcaatttagaactttcgaagggccaactgagaattaggcttcctttccattttctctgggaggctcagtattttctttgttccaattgtgcacgcaaataggcaagtttggagtttcaaaggagcccccatttttgccaacaaagtttaagattaccctaagtagtttttgtccaaagacttagcctattacaattccatggaccataatttttgctcataaggccagcaggagaaaagcagtgccggaaggtggctgatcagcaggggaatcttaaaatgtgggttatccactgcactggcctgatgaaaatgtcccttccaatgcccttagtgtgaccctccccacgaaaccttacagacgagccaagttcgactgggaagaatccccccaaaggcagagtcaactgggatggcagatccaccatctccccaaggtgctgggtagtcccacctccatcctgagtaccttcttagccaccagggcctgatcccagcagggacagtagctccttgagacccagcaggaagacaaggtctgtattcagaagtcccaggtgccaggtcacaatgacctctcacagtgggggtgccaggtcacactaacctttcacagggacctgggagcccttaataaccaaggcttagttcctgttctttgaaacatagattacaacaaccggacccacttcccatggtagctgcaggggttaagtgagatgctggctctgaggctgctgtgtgaattgcccggtgttgttgaaaacttggtttattggattcaatagaactcttcagatgccagcaacaggaaatccagttcaacaaaacttaaactataaaaagaatttattggctcacagaactgcaaagaccagatgcaatgcccattgagacttagagcctgaaggatgtggccatgggccccgatgacctctggcccacactcctgttccttcggtggccacatcctggggcagattctccccactgctccctagaccttgacactgagggaggaggccctctgccctgaccctggccctaggagagagcacactgtcctggtcgctccagcagggggcccaagtggtcaggcctaggccccatgccctcctgccccagtgagtgtcagcttacctaggcctcagaacctgagagtagggagggctgggaccctgaaggaaggtcagggaacttttacgagaagagggatagacttggagaggagtaaacagcagaggtctaccttgctgaccatcattcctactactgtcgctggagagaggttcctagagccggtgaggccaggagcccctgcgtgcatttagtctccacaccctggtgtgagagagccataggcttactgtcctcaggtcagagtcctccctggtcactctcctcggcctcctagcctgctgcctgcacagggaagcaatgagcattctcttcctgagtgccctgcaatggagccacacctccaggcactccctccctgtgaccatgaacagggaggaggcctgacttctagtgacctcaccaggtgactcagagcaccatattgggcccagggtgtgttgcagaccagggcccaggtaaagggtctcattgagcttttattggccctgatgtttacagcagagaagggagaactgacgctgcgtgggagagacaggctggcctagggcaggggctcaagcacaggaagaggctgtggtccaggacccaggagccgctgcccacccccagtgctcttggcactttctttgttcaattgggaaataaggtatgcactacatgcatctcccatcagcccctcgcgcaggagtggtggggagaggcaagctcttctgacagatcagccctgctgtgtctccggtggtggcatcctgctatctgcacttgtgtttgtacttggtccctgccctgaaggctcacaatctacctgatatggggtcagtccaaacagtgcagagagggcgtgtgcatggcaatgcagggcacccgctccctttcccaggtgagagaaaaacagggctcaatatgtattccttgggctctgtggaggtgcaggaaggcaggaaatcgggagcctggggcctttcaataaatgaggaagccacagacctgggcaaataaagagaggggagagaaagggccctagaagcaagactgaggaaaaaagagatccctcccagaagtgaggtcagggcaggtgggagcatgggcccagaccaggggctggacccagagcagggtacacgagccccagagtgatcatacaagtgatacaggcattgtggggaatccagaaaacaaataaggatgtgcagggaacctcttcattagagcttccacgggctgaccctgctatgagcaaggtgaggacacaaggagagcacttctcaccaggaaatgccaagacagcattaaggaagcctgcctgccaagtgtgtgtgtgtgtatgcgtgtgcatgtgcatgcgtatgcctgtgtgcgtgtgcgcctgtgtgtgcgcgtgtgcctgtgtgtattgcctgtgtgtatgtgcatgtgtacctgtgtgtgtgcctgtgtatgtgcgtgcatgtgcctgtgtgtgtgtgctcacgcctgtgtgtgcatgtgtgtgtgcatgtgcatgtttgtgcctgtgtgtatgtgtgcatgtgtgtgcctatgtgtgcctgtgtgtgtgcgtgtgtgtgtgtgtgtgtgtgtgtgtgtgtgtgtgtgtgtgtcctgctgcagcctcttgacagctcccagggtttaggctccaaaggcagagggagggagttccagggctggcactgggactcccagcttgtctcagatgtgcatagcaggaaagtttcagggaggagatgggagagcagggtcctgagcctcttcccatgagctgtatatactatactaactgtagagccacccaggccccagagaaagcagggcctcctgtagagaaaagtgaggaacaactggggagggaacaggggaccatgagggaagcactgctaaattcagaagaaaaatatgatagtaataatggtggccattattgagggctgtgagaccaattcactcctcacaaacacctctgtgaattaagcactgcacagagaagaagttaggtgacttgcctgaggtcacatagctaataagccgacagtgctgggatagaccaagagaacagcctggctttggacctaaaatccaacacttcggttatgccggtgaggaatccagttcttgctgggaaggcacccacataaggtctctggcctataaccctgggtgctgagttccttctccagaactgggggtggggggggtgctgggtcaaggcagccacactccactgcatccttgggtgagccccaggttggccagggtggtgaaggcgacgaggctctcagagctcatgaggtttgtctggactgctggagacaaggaagccccggggagtgcccaaggtctgtggggagggagtggggtggagctctacagctggtattgtcatgccattctccttggagtgctccccttgctctatacaggccaggagaggtgtcactgtaaggaagaaggggcctaagggatggaaatgcagcatgaggaaatagtttcaatgccatagagaaaaatatctagaagtgttcacacccatggggcttagtaattataccactgtcagtcagtcctaaggcaaagaactatttgcaaaatgttatccatcaagtcactatttgtgaaggatgaaagttagaggcagccttaactttcaacaccagcagagggtttaaatcttttaataattcctggttgcccatggctgcccatgtagccattcaagagatggtgaagagctcctctcaacacagaacaatgtttactgtaaaaggtaggatactaatggcataccatgatttttcttggtaaaaacatgtttatgggaaaaactggaaaaagtagaaaattcagtaaaatttaagtagtggtatggaatgataggtgaatgaaacaaatattctatctcccccagtagagtcaaaacacagttatttttgaaagagtataatataaaaattagcaggcagtttaaaaacaagcatcaaggcagagagacaaagtctggttctctatttgttcggcaacatcaagatggcaggatcctctgggtcaccagcccggcacaggactgaggacattataggtgctcactgaacatgtgttgcactatacatgcaggttccagaagcagagatggaatccctgctccccaagagtggctggttatcacacagcagtgctgatgagtaggcacacgggctgtgataaacaccccttgggggagggtatgacctgaatctagttggttggtctgcagacggggccaggctggggctccctcccccagggaggaggctgctgagggaccagacagggaaggggtgcacggtgaggcctattggggtttctcatgttcccccaaaagcacagaatgtcttctactgggtgagaccaggaagtggaacagacagccagaccaggctttgagcgagtcattcatggaagacaatggaaaccccatcgtcgtgtgccaggcgctgtgcacagagggtagaccccagggaaaatgcagagcagctggggtcccaggaggacactctggtgctgtggtgcccctcccttgccacactgcattttctcaggtgggggcaggagggcaaagtctgcctcatgtcctgagcgggaagagggggtgggaggtagaatggcacgcagtatgtgccgtggaaagccatgctggaggaatggaatgtgcagtcagcaagagcagaaaagaggttctcggggctggatctagtgagggcccaccagtgaccccagtctgtgctcaggccttcatttagggagaactcaccaggctgggtgtggcctcgattcctgagatggcatccctgggaagaaaaagggagggctttccaagggggcagggatgggcaaggcactaaagtaggcttctgaccctgaagggtcatgctgtgggtgggcggtggacttggtcagcccacatgttgtggctcagtccctttgagcaagagtttcccagcagcttggattctgtacctgggctgcctgggctttaatcctggctctgtcacttactacacatgtggcctgaccaagttattttacctctctatgcctcagtttctaatcttaatcttctcagtcctactagttcttagggccccgcttgacaatctcctcctccaggaagtcttcctgctgcccaaggtgaattagggcccctcttccatgctcccatagcagctatgcgcaacagctttcttcctacatcacagccacgttttctctttttgttttccattctgagaccgtagagtttttgaggtcaggagatgttcttgtggctaattgttttgttttttaggttttttttttttttttttgtattttctcagtgctaggaagtatttgctgaaattcacgtaaaatggaactaatgaaaataaccttcctcatttggtggttttgaggattaaaagaatcaaccttggcagggcgcggtgactcacgcccgcaatcccagtgctttgagaggtcgaggagggtggaacccttgaggtcaggagtttgagacaagcctggccaacatggtgaaaccccatctctactaaaaatacaaaaaaattagccgggtgtggtggcaggcgcctgtaatcccagctacttgggaggctgaggcaggagaatcttttgaacctaggaggtggaggttccagggagccgatatggcaccactacactccagcctgggcaacagagcgagactccatctcaaaaacaaaacaaaacaaaacaaaaaagaatcaaccttgtattagaacctggcacagactgttggcactgttaaaatataaaatagtggtcagggtgacttgcagaggaacaggctgccccaccagtgacagtgacaaagcagtggagcacttgctgcaaacatggcctctgactcaggagaggcagtcactgttgagagttaatccatgatcacacttgggtatctaaattgccaaggaagcttcatcagctgctgcaggagtgggcagtgtggcccaccaagttcatggccagccagtggtgagaagagacaaggctgagacccagagacaacccagaggccttcagggggcagaaggagcggggtttgggcagagagaacaatggcatggaggtctaggagcaatgaggccttttccagtcacgagggcccttttagaatttatttctgcttaatagcacttaataaacatttttgagcaatgggatatgttaggtcaaatgggggatataaagagagttgacacagaacctttgcccttgaagagcccacagctgagttgaaggaagagacctagagcacagtttactaacatcaaaccaccaacccccacagcaagagcagcttcccagcattgagacctcactatgctccaggcattccatgcatcatctcatatgcacttcataacagctcatcacgaagagaagtcaccgcagatccaatgggttaagcaagctatcgaaggtagtcagcaattttgtctgactacaagttcgtgtaataataatgtgaaccactccttgaagagtagaatccaagcattgtgaggctggcagtgcaggcaggggaatagcatgagcaaaaaccagaggtgggaatgaatttaactgccccaggaggaggcccaagacagctggagacaattcaggcagacaggagagcccgtagctgctcagctgctccctgtctttttccttccctccgcaaccttgagaaagttgtcgatgggttctatttgcattttctcctatccagttcctcctgcccacatcacccactgcagacactcttgccaagttcctcaatgccagcgttgccagcctggtggccactcctcaggccttctcttgcctccccagcagcctggccatgtgcccgccctcctccattttgaaagagtaccctcagctctatcaacacctcctcccctggtttactttcctccactctggctccgtcccttgtgccaccttgatattgctgtggcccatcctggacctacttctcatcaacacagtctccctaggagactcatcccttcttgaggcttaaccaccacctccacgtgggatttccaagcccatatctctagcccagtgtccaccctgagtgctggacccatatacccatctgactcctgaagatctttacttgggtatagtctgggaaatttgaatttcaaatgtgaccaggatactcactggcttccttcaatagtgactgctccttctgggccccctctgtcaggagtgggcatcaccaacgctagttgcccaagccagatcctgggagtcatcactaacatctctcctctcactgatatgtgggtgccacctcgctttgacatttcttaagcttttctctccttcctaccaccatcccactgctgccatgccagcttttatcatagctcctgggattccttccacagactacctaattccactctggctgccagagaggtccatgtgaaatgcaaattagcccaggtcacccttggttagaagcctttaacggctccccattgtgctggggagaaaacctaaactcccagcctctttgcttcacacacacatacccactgcgcttggtcttgagctccagccagactgaaaccatggagtaggtttaccctctttaccctaatcctctcaatcctactagttcttagggctcagcttgacagtcgcctcctcctagaagtcttcctgctgtccaaggtgcattagggctccacttctatgctcccatagcagctgtgcacaatagctttcttcctacatcacagccacactttctcttcttgtttcccaccctgagaccatagagtctttgaggtcaggagatgttcttgtggtttagctttttttaaaatttatttatttatttatttatttatttatttatttatttatttatttgagacagagtcttgctctgtagcccaggctggagtgcactggcacgaccttggctcactgcagcctctgcctcccaggttcaagcaattctcctgcttcagcctcccaagcagctgggactacagacacctgccaccatgcctggctaattttgtatttttagtagagaaggggtttcaccatgttggccgggatggtctcaatctcctgacctcaagtgatccgcccgcctcagcctcctcaagtgctgggattagaggcatgagccaccgtgcccagcctattttttgtattttttcagtgctaggaaatatttactgaaatttaaggatggaaagtctgggagaccgactctaggagtgctcttgaaaggaaatgggttactccatgtgtaggtgttgaaaatgtaaaacacaatattatttctccctttttccctaataaaaccccaattttgttcagaggacagcaatagtgttaattacacttcttagcatcctttgcagggggtagctatgtgacccaggtttggccaagaagacttaagtaaaagcaactgtgcacgcaagggagagatttgctcccttgatgtaagcatggccccttcctgtttcctgtcttccacatctttcctggaattaggagaggaggctggagatggagcagccatcttgtgacaatgagccagccacagggatgggaaccacaggctaaggaatcttgaagggcctaggtcatgacccctggactacctactagcagacttctaattattgagagacaaataaatctcatttaagtcattttggttggctctccattacatttagctgaactccacccagtaaaggtcaatgaaggaagataagcatctgtgagcatttctgaataggcttttcctttggagatgatgctggcgctgacgggaggcagagggccaggttaatggaacaggactaggtgagggctggagaggctgatcctcccaggggttctaccagaggatcacagtgaggcctcagggtttgagaaagaagctccaggcatggtagccctaaggtgtctgtgaccttggcctgggggttttctggtccctgtttggttcaacttgcaaaatggggctgttggactagacaacttatcagaaggcatagtgcttcaagtctgggcttaggagtcagacaaggctgaattcagggtccagctccaccacttgctagctgtgtggctttcagacagctttcttagccgactgctctagcatccttgtttgtggagtccagactccatcagtacctatacctgtagggctaacgttggggcttcatgaaatcatgcatgtgggtgctcagcagagggcctggtatgcccagcacacaccaagtgctccatgctggtacctgtccttgtgtgccatgttctcccagtggacagatgggacctggaattcatgcctcctctggggctggggctggggctgctacagtgctgtggaaagcctgtcaggatgtacctcgctctgtggctgagtgaagaggccagaggctgcccactgttcaacatctttggaatgctgccgtgtccagggaacttgggtcgcaggtggatagaagcccccaagcccaggccaggccagaccaggcccagaaaggtatcaggtcttgggtagaataagaagcctatgtggtctatctatcctgtggcctttgtcttagccaaagcctcctggatattgacggcatcttttcctgggtttggggtgggcttggagaggttccctctgcacgggactacagaagtgagggagctggaaaaatgcctccagagctggattcctcactgcagctgcttttggaagaaccttcttatccttcccttgagaagcctcactgtctcttctcggcgcttggaatcctgttagtagaaaatcttggggaaaaaataaacccactattcattccagcactgagaaggaggtcagtggggtgcgtcctgtttgtccacaccccccccaccccctctacccctccccccagcaccccaggccagacccagccatgctgacacttgacagcccctgcagtttaccttggctcaggtccagagacttcgggcccagcccccaccttttcaccttgttacccagccccctctccagcgcaaagagcagtttaaatataaatcagtcctcaacacaaacagagctgcagcgagtctcagagccatcaccggaactgagggcccaggttttctgcgagtgcaaacaagcagagactggctccgtaaatctccccaagaacgtcgggaggggtgctggggctcccctccacccccggctcacgttggcccctccagcgcccgcctcgggcaccctcatatcccagccttcctgccccccagccctgccaacctctttctccatcccctccactcacccaccttcgcttcgcccaccctctcttcgccagtccccaggaacctccacccccttgcaacctcctgcccccgcacagccctcacctcccctccccgggcccgccacctccttccctccctctccgcctcccggcaggcgggatcttctcggggcagtcaagcctcgcgggtcgctgcggcgtcacacctgtctgagggggcggcggcggcggcggcggcggggcgggggctcgtagcgcctttgacacccgaggaaaagagggaggagggagagcgcgtttcatcatcggcggcggccacttataaaaacttctaggcgcgcactcgctggctcagtctccgctccgcgaatctcctccggccactgccgccgcggtcgcctctcacccgcccggccgctccagcccgaggcgccccgaccccgcgccactccgcgcccggccagccgcccgcagccatggggctcctgcccaagctcggcgcgtcccagggcagcgacacctctactagccgagccggccgctgtgcccgctcggtcttcggcaacattaaggtgagcggagtccgcggggtcttccgggccggagccgcgcctggcgcaccttcggctgggcacccgcttctgtctgccggagccaggaggctccgggagccccgggctccctcctgtgccgcgctccgatctcatccccgggcgacgcgtgctgggcgtgtgtgtgcgagtgtgtgtgtgagcgtgtgtgtgtgtgagcgtgtgtgtgtgcgtgcgagtgtgtgtgtgtgtgttcacacgccttcatcggactaagtaatgggacagtggaagtacctgcttaccgcttactcggacaactccaggcagagttataagcgagagaattgtcctcgatgattgaaaaagatcatctcgaggaacgctttttcggcctccagcgggcggttacttcgtcaatgggatgggcttggaggtgccagggggaccccccgcgctttgggggacagactgtgtctcgtccgagccccctcgtcctggggtgggtggcctaagggatgttctccttccccaggctttcttctcccgccaacgggggcggggggctctgctacctggctgtgccgctcgcagttatgtttagaattccctctcagcgggcggcttccccaggctggcaaccaacccgcgtgctcagattggcttccctggtctggaaatggccccaggaaggtcacagctctcacggttcagtaaggtctaagcaggtccactcaccaggcaagttatggggagcgggtgagaagatagggtgttggcagctgttaggatgagagcacctttcccatggggtcggaaatgctttccactccctcacaggtccaggaggacctggaatggttcaatccgcactcgggctcttttgcccgttctgcctaggcagaagtaacaatggaagatacctcctgagaggccaaagctgctgcggtgaggatgtgggagactgcagagactgcatcaaggccccttctggtcagggtgggatcatggtgtagagaggttgtttcccacaaacatacagtcagatgggactgagtaaagcctccggtggtgcaattaaggggaagccagattacacaaagggatgatgggggtgtccgtggactggttatatgtgtccaacagaaagggatctggaggtcagagtggatctcacctgcatacttactcagctgggatctccactcctgcttctgctctttccgcaccgcaataaatacaggctgaattgattttgtagttgtatatggataagcaacagaaattttgagatagcttaaaataatctccaaatctcctcatttttggccagacctggatggaaatgttgtgcgcagttttggttccaccattttggagaaatttcatcaggaattttggaacctttggtatttataaattaggaattgagatgaaagggtagggactaggattagatggtgtaaagaaaggggcctctgcaggaaccagggtggggcaacctcacttcattttcaccaagaagggcaggagggacgggtgtccagaacagattcctgacagtgagggtacagctgaatgagactgatccgtttagacccaccctggttccctaaaataaatgtttatggcagcaatttatttggagatctatataaataagatgatttctcatgtgttgatgatttaaccacacgtacctgagggctgggctcaggccaattggcctcctaaaggagttaagtactcatactggctaagagtttttcttgactctaaaaatgagattctgttagtcatcacctcctttgatccatactaattgcaagaccagagtttggaggacttccatttaactccacttatcagcctgaaaccaggtacgaggttggatagcttaaggtaaatcttgaatctcaaattccatcagttaaagtcacttgcacctttccctcctggggcaataactgggagctctgctatttgaagggatatttcctcccaatgagagtgcttgtaatagccctgccactttgcagtgggggatgggttgcacatatcttgggacatgtatgacatggtggtgtagcaggacgagccacagacaaaactcctcagacactgagttaaagaaggaaggggtttattcagccgggggcatcagcaagactgctgtctcaagagctgagctccccgagtgagcaattcctgtcctttttaagggctcacaactctaagggggtgcacctgagagggtcgtgatcgattgagcaaacagtgggtacgtgactgggggctgcatgcaccagtaattagatcggaacaaaacagaatagggattttcacagtgcttttctgtacaatgtctgtaatctatagataacataaccgattaggtcaggggtcgatctttaactaccagcgctagggtgcggctccgggctgtctgcttgtggatttcatttctgccttttagtttttactttttctttctttggaggcagaaattgggcataagacaatatgaggggtggtctcctcccttattcccctcctttgagattctcactcaatagtgggagttctcactttcatttttactacctgtgtcttcttgcaagacagatcgatagtgattcatatagtacacttgtgctgaacctttttggtgaactaaggtagcgatgaagctttttatcatttgaagaagtataggtagcaaacaagggagcagtaagcaggttcctattactattataactcttattattagagttttaaattctcttagcgctgggaaccattttctaaacatggccccaggatcaaatccatgccacacttgcacaggcacatgtgccagttttgtcatatctcttaactgtgtcttcaactacttgcccttgattatctatatgtaggcagcaattagaaaggttaaatttcctacagacctctccttcagctgctagcaagtagtcaagagctaatctattttgataggtagcatttctcatctgagtttcttgctgggccagaatagtcaaggctctgccggttttattagtgattatttttaagacagcttgtaaccgtatgattcagttgatcacgtaaatgggggtctggtatcctcacaagccgtcttgtgcctagcaggcctataatattgtatgattttctcagggggccatttatcattttttcaatttcctatagctatgcttctcttttcgcgggaagcatagacagggaagcccaggagttcgcctgtttttatgggcagtaggaaaaagatggtttaatagtgccaataacaaaactacctgcctactggtcaggtaatttggcgtaagctctatgcctacgtatctagtataatccagtgggggctgtctagtcccggtgggactccgggtgggtccacacggtttgcaactttgggaatttactaaatggatttctctctgtgtgattagaactccaccaaatgactgtttttgtgataccattataagtttctgtcctagacaaagaagtcgtcctatggggtgagtaaattcttttccttctctagctatgcaatattgtccaataattgaggcttttaggacctagaaattatcagggtgattcttctgagctgggaattcatcaggaactgggtctgtaggtactaattctcgggcttcccatggtcattgatctcttattacagttcctccacatacataacatgaagtgacattgagagaacatgctcagctaattgcaaaaacaaatttcttgtttttcctggaatttctggtactggcacatttagttcatcatagaaagtttgaaacactggcttaggagagcgtttgtaaacttctcttcaaaccaagatatttactcgaggatccagtccagccccattgattcctaaggtcacacgctcctcttttttccagcgaggatcaaggggattggttattactagctctaaggggttacattgtcccttagtacaggaagggccattttttcctttctgaaggtggactggatctttttcattttttttttatcgaagtggcctaaatgacacaagaccagtatttacatttctttccacacagtcttaatttatgacagatgtacttattttctgctatatagcctcttttctaattaagagaaccacagcttattcctaacttattactattaatgacagcacaggcatcaaattttaagatgactcgtttgggcacccctttttcttctgttttggctagcactttactcatatcatttgtgagccctcaccagtcctcagtcctcaatctaattttaaaaactgtggtcatgggaggctcagatgggtcataacacacatcaggttggtcatttcctgggctacataccttgtatagaattatattatacaacaagttctttttagagttccagtacgcttataataaccataaaataataggaccgtagcaaccttttgtcctacctcagtgacttgatgtatacactgggaatagtcctcagtctgaggaaggtcagttgaagtccttattgtaaaaatgcaaattttaaggaaaatgagtcccgcaatgagttttctcatgcttcggccgtgcatggaccagtcagcttccgggtgtgactagagcagggcttgtcgtcttcttcagagtcactttgcaggggttggcaaagctgctcccgtccacatactgctcacagtctactgatgtttaaggatggtctcggaggttgggcctgttagaataaactgagtccaacacctctacacagttatgttcaactgggctctctgatactgggagcaaggtggtggggtttagggtgttgcaaacttcaatggttatgtggggattttcacatagcaagctttggtacttggttaatctagcatttgttaactaatgatgtcctttggtagtcattaaagttaccacagcatggggagcgtttatattcaggttttgcctaagggttagtttatctgcttcttgtgctaacaggacaagaaggcccttgttgctgctagggcccttaaacctgggggccaggctttggaaaccccgtctagttgttttgagagacaggccactggccttggccagagccccacagtctgggttaaaactccaactgccattttttctctttctgacacatagagtgtaaagagttttgccaggtcatgtagcctcaggtctggggccaacatgagtttttcttttaactcatgaaaagctcgttgctgttggttgtaatagatgtagtttatctaatctacatttttgttaactgtcacccacaaaaatattgactcaaatcctgcagctatttgatttcaagctttaaattgatatggtattcgtcatgggactccaattgtgtctaaacagacatgagagtcgaaagacctataaggggcttctctcgctttacgatgtcttatttttctccttctggttgatgaaatgccagggtgaaagggatagccaattggactaaagtacaagtgccactccatttattcagcagagtgcccagtaaaggtccaccacaataccaccacacatctgctcggggatgaacaagggctgactgattgataagctcttgaaaattcttaagctaactgcatcctttcaggtctccaaggaacactaagtttcctccctgtcatgagagacatgaagtgacttagtgttgggaaacggaggctggatggcctttgggggctgacccgcagggtgccagactttgggatatagcagagagagcttggcatgacttattactccaggctgtagaatcctggaaaagagccatgcagcctacacctggtcaactggaggaccaccttagtggaaaggggacagtctgggcctctgacctgccatgtgcacaagcataacaattgcttttgtttaacgtgcagatggaatatttgatccattttaaccaagcatttgcatcttggtatcctgtctcaaattgctaaagtttgttttaagtctttaacttccatgatcctctagtaaaatgaatgtatgattttaggaaattacaaaaactggttggggcagtccatccttgctctttagtggtccacagaacattggaccaactatggcatgaaagctctacatcggggggcaagacttctggttggcactggggtctttattgaaatctccccagattaaatggtcctactttactaatgcccagtctgaggagagtcaggagggacagaagtacttttctaaagcagaaagctgtctttgacttggcaagtcctcacagggtatagcaaggcaagcattaaatgcaatagtttgaggagaaattgacttggttatgttaataactagatggtcagcaatagaatgaggaaagaagaaagagtaatagaatagattaaaagagttaaatttttcttagctttagtttgatagggttttcccctgggactatggcccacaattctggagggggtggcgctttcttgactcgggtgtaatgagtccattcttttgtttgtttgtttgtttgtttgtttgtttgttttgctgtatgaacagcagtcttgttggttagcagcacaaggtagggtccttcccaggctggcttgagtttttcttctttccaccctttgatgagaacgtgatcttcaggctggtgctggtttactggaaattctaggggtggtacatgtgctaaaagacttagtttttgagagaaaggaaagtggaagataaaccaagtatataatttttaagacatcgaccttttgttttaactgtggggacctggacagtggactttatagtccttagtgcctttttactgagaaatttcctttagcacctatttttattagtttttaaaccaaagaaagccaaataccattttgcatttaacagtgcttctcatatgatttttacaccagataagctaaattttacctttatattagtgtgttattaatgttaaacctaattttaataaaaccttctagacatatttatctaatttttaatgtttgaccataaggtaagattttatagactctttttaaccttttataatttttgctaaagagcaggttggtgctttaagaaaaacctgttatgcttttactttaatgtccagttcacagaaaaactggatgatacttctttaactttagctaatatgtttacacacagaattttctttataattaacgttttaaaacttgcttaaaccttcaaaacaataattttttttaactttttaatgtaggtaaaaatgtacattcttatgcctccttataatctttttaccaaaggtatattttacttttcttatacaccttgcatacaaactgttttttaatagttttaaattcaggaggcctagttacttttaaattacaccacattttttgcataaattcttttttataacttttttctttcatgactttcgcagataattcttcgacatgcctcaactttttgacttattacaaatatttctttctttaaacaactagttaatttatttcaggacaagaatttaccatataatactctttttacataaattccgcccctcctctttttttctttttttttttttcctttaggatacttctgaactggtgaggtgtgctcacaatgaggtttcctctaaaagttttttttttacttttttttttttgttagcaaagcagttgcagctacagattgaatgcatttgggccatctgcgggttactgggttaaggattttttataggaaggcctcagtgctttcaggatacgcccttgtttacactgacaacaaagtggtattggagtgtgataggttacagagaataccttcaattatcaattataggttttaaatttaccttggcttttatagggtacactttttttttcttaactacttgtatatctctctctttctttctctctttgactttgtctctctctctttgactttccttttgcctctgtctcttcttctctttcactgcctttctctttctctctctctctccttgactccctctttgtctgtctcttcctctctctttgcctcttttcttctctctttcctttctctctctctgctggtctttccttgcctctgccagccacttatgctgctgttctctcaaccactgtgtgttgggggcggggggtctaaaaccagctgtaaccaagtgtctatgtacaggaactggtctgcattccctggcttacaggttaccttgggccacacctttgaaacaagggacctgtccaggcttccttctaatggccaacttacctctaatgctggccagtctatcttacacaaagttttaagttttcctagtgtcacagtactccatagtctcctttaaattcttttttgaaatttttcaacatagttcctagtagggtgggcttatttgtgcctgacctatgcttcttcgagacaaaacacgctcataccacatgcacaccacaaaccaaagaacaggtaaaaagggcacgcacacacttttgcagtttgcaccaaagcaaaatcaaaaccaaaatcagagtatccagaaatccaagccaggtcaaaaccaaaaccaaagtatcaagcaatccaagtcaagtcaaaaacaaaaaccaaagtgccggtacaggcatgccgtgggtgatgaggccacgcttccactcaaatggagtgggcaagttcccaagaccaatcctgtcaagcaattcaaatcaagtcaaaaccaaaccaaagtgccgataaaggcacaccatgggtgatcaggccaagcttccactcaaatggagtgggcaagttctcacgaccagtcctgtcaagcaattcaaaccaagtcaaaaccaaaaccaaagtgccgataaaggcacaccatgcgtgatcaggccaagcttccactcaaatggagtgggcaagttctcaagaccagtcctgtcaagcaattcaaaccaagtcaaaaccaaaaccaaaaccaaagtgccgataaaggcacgccatgggtgatcaggccacgcttccactcaaacggagtgggcaagttttaaagactagtcttactaagttttagatgtccagaccggtgaaaaccttcctggtgttcagccactgcgttgctcctctatgggggcctgccacacactgccctggcaaggcgtcccactggggcaaatgcctacccctgagcgctctcaggatctgcgttgcttgggctagttggagtcccccgccgagatgttgcacagggcaggcttaagccgcctaaggagctgcctcgaccatccgccaatcacctcgcttcccggtcagggaaccaagaaatgtagcagaatgagccgcagacaaaactcctcagacaccgagttgaagaaggaaggggtttatttggctgggggcatcggcaagactcctgtcttaagagccgagctcgctaagtgagcaattcctgtcctttttaagggctcacaactctaagggggtgcacatgagcgggtcatgatccattgagcaagcagggggtgcgtgactgggggctgcatgcaccggtaattagatcggaacaaaacaggatagggattttcacagtgcttttctatacaatgtctgtaatctacagataacataaccgattaggtcaggggtcgatctttaacgaccaggcctagggtatggtgccgggctgtctgcttgtggatttcatttctgccttttagtttttactttttctttctttggaggcagaaattgggcataagacaatatgaggggtggtctcctcccttagtgggaacagcggaaactcaaccagagggtctgtcatttgtctaggttccttgttgctggacagactaaccaatccactttggacattcctgcaaaaacccacataccatatagtttaggggaagcggataaagccagaagactcagatttaaggtcccatcccagccacctgctaatgggatgatgcagggaagcatttctcaccttttcagggcctcagcgtccttacctgcaagagctggtaattgaccaatatccagctcatggggctcaaaaaggattatgtggaatgaggcataggaaaaaggctttgtaaaccatgctgtgctgtcaggatcagtacccatctgagatcaattcttgcttcaacaaataggatttgttcacattcaaacatttaggaacaattgttccaccaattccgtgaggcatagttattagttaagaaaaaccacatttaataataataatgatgattaaaataatagtaatagtggctaacagtatttgagctgtatgaatgtaccaggaactatggaagtactttatctatatttaatcctcattacaaccctatcaggtggatactattattgtcctcattaataatgaggaaaacaaggcattgtgaaattgttcacataaccagaaaggggtggactatagaggaaccaggtatgtgagacttcagagtcaaagacccaaacccctgttcaagctggccctcaccatcaacactatgctgtttaacactggtttagcaggggtgtgcttattcccagtggccagtggtttctctgggccctgttgacacatacatcccagctgtgaccaaggggagcagcagtggcttcaggtggatgctcccagtggctaacgggctgataccctttccctcttcataactctcatctccagaatgtggcagctttcaggtgggttttatgtgcctgctcctgcagtagtaaaccagatttaatctagagtctctgttgcctctagcttacaggaatcttaagaagcagagatctgctccacaatcactgttcagcatttggtgtccagaatgctaaattaaacaggttcatttagtaatcctgagggtgggggtgggaggcagcttttgcagctgacttatcctggcggcttcaggaagttctgtttctccttaaaataaaacttgcccttgggaccaaactgaggttatcttatagaaggagtggttgatgactgctgccaaatttcaggaaatcacacacccagagctccagtagtgaagtaatgtatatccaatcagtgagggaacatcccggtggagactgagggctggagaatagtgggaagaagggaaaggcaaacctcacagcttggcttcggtggccctggtgacttctggcctgggaggaccaaaaaatggggggagaattactttgtcttggcctatgtccatcacttcctgaggcttctgacccccagcaatggggaggcatcttgggcttgcttaactaatcagtttccagagcaaagtgctctatcccagcaaccagattcatgctcaggaaaacactctcaagaaaatcccctgaacccaagaattcctttacccacccagtgagttaagatatgcccactcctccccaggggtggtgtttctctaacattgaagacaacattgttctgttcctaagcatctgcctcctgagaggcctgcttcccctgcttgtagggagaaaggaagagagaacaacgggaacgggtaggatcaggtgggccatgggtcgctcagacctcctcttcctggatgatgctgaaagccctccttagctttcagtttgtcttctggtggtactcacatggaacaaatggaagagtgttgtatgtttcgcagtatagatagctcatttcacctcacctctttctgatcactgtcttttgttgtgacagtgactacctgttttttccattctgagagatccagaagtgatgttggaacgttgagatgtgcacgtggcttccctttgccttcttttgtcttgcttgtgtaatagaccagggtgtatgcagaggaatggagggggtcccctggcctcgcccctcttcattctccctcttctcaacccccacttagttttatcctgctccatgtctttaaccagccccagcactcacttcaagcccctttctgcctgtggcggcgctggccttcagaccatttatgtgccagagcctgagagccagtgatggtggaactaagcagccagggatactcccagggcaaatgagcccatcaggaagcctgcacagggccaggctagtttggcccctgttctgaagttaagttcactaacatgtgcttggccatcccattctgtttctgttgaggaaggacatgaagacacagctgtgtgaatctgcacctgtctgtatcctggaggatcaacgtggatggttatcactgcggaatctggggcctcatgagccaccatagagaaagtcagctgagttcctagtgccagacaaaatgattgatttagaattgaaaaaaaactttttattttatagcaattacagattcataggaaaaatagtgcttacaggtcctgtgtagccttcacctagtttctgccagtggttgcatcttatataatttcagtataatatcaaaagcagaacattgacattgctatcaagtgtgtgtatagttctgtgccattgcatcacacatgaagatttgtgtaaccaccgccccaccacttcaagatacagaactattccatcaccacgaggatttctcctgtgctgacccgtttatagtcacgtccccttgcttccgtgactaccatctctaacccctggtaaccactaatctgtcctccacctgtataatcttgtcactttgacaatgttatataaatggaatcatacaatctgtgaccttttgagattggcttttttcattcagcattatgcccttgagatccatccaagttgttttgtgtatcaatagtttgttcctttttattgctgagtaatattccatggtatgaccgtaccataatttgtttaaacgttcacttattgaaggacatttgggttgtttccagttgggggctattacaaataaatctgttatgaacaattgtgtaaaggttttgtgtggacattttcatttctctagggtaaatgctcaagtgtgtttgctgggttatatgttagttgcatggtgagatattttttaaaaaactgctgaactgttttctggagtgatcacaccagtttacattttcaccagccatatgtgagagacccagttgctgtgacacctcatcagtatttggtattgttacaaatttttattttagcgattctaatagatatgaatagtgacacctcatcatggtcttgttttgcatttccctaatggctcgtaatattgaacatcttttcatgtgtttatttactgtttgtatttcctcttcattggaatgttttttcctatattttgcccatcttctaattgtaatcttttttttttaacagttgcattttgagagttctttatatatgttaggcacaagtctcttgtggggtatgcagtctgaaatgattttcttctagactatagcttattttttcatcctcttaacaaggtattttacagagaaaatgtttaattttgatgaattttaatttatcaattttcaattttctggatcctgcttttggtgtcatgtctaagaactcttcaccaaaccttagtttccgaatgatttcttctatatttcattctaaaagttttctcatttacatttaaacttattttctattttgagttaattgaatggatgtaaggtttaggttaaggtgttttttttgtttgttttgttttgttttgtttttttacctattgctatccagttgtttctccaccatttttttgaaaagactatcctttattgagttgccattgcacctttgtcaaagatcagttggctgtacttgtgtggatctattctgggttttttattttgtttcgttgtttctgctgataccagtctgtcttcattactgaagctagagcaagtctttatttttatttgatgagcccatccatctttattttctttaaaaatttattatttttgattgacaagtttttgattggcataattgtatacattatggagtacaatgtgacgttttaatctgtgcaatgtggcgtgattaaatcaagctaattaatgtatcttgacctcgcttatctatcattttttatggtgagacattggaaatttactattgttttgaaatatatattacattattgttgactatagtcactctgctatgcaacagatctcaaaatctattcctcccatctctctgaaactttgtaccttggatcaaccactccccatttcccccctcccaccccacccccagcctctgtaaccatcattctactttttacttctatgagttcagctttattagattctgcatttaagtcagatcatgaggtatttgtctttctgtgcctgtcttatttcacttagcataatgtcctctagatttatccatgttgcagcaactgacaagatttcccccttttaaaaggctgaataatattccatatgtatacatgccacatttttccttacctattcatccactgatggatgctgaggttgattccatatcttcgctattgtgaataatgtagagcaagtcctgaagttggataaaagcttggttttattgggcaatggtatgtgtttatcttatggataccaaattttattacctgttcagtttttcttctattctggcttttaggaagatttaaggacaggtttaacgcttgcttttggtaagtgaggggatcttatgtatttatgtgctccagcttttcttctgcccttagctgattggtatgttttttcccttgaagttgattttcaagtctatgttcctaaattttttctaatcttaatgacagccctgcaagagaggtatcaacgtctccatgtcacagttgaggaaaccaaggctcatccaatgccacatatccagtaactggcaaagcagggattcccacctggtcatctcactcttcttcttcccgtgaccacggaacatctctcagctctggattctctcatccaccagcatttgggcctgagctcagtgatctctgaggtcctttcagactctcagattcttatctcatgatgttaagttgctgattgagatgagactaggagcagggccagttaggtctggactcttctaggagacctgttatgaaacctggcgaaagcacccgcattgtctttgagtaatccccagccctttcagttgagaggaccttaattccctgggtgtgtcttactgtttgggatggattaaatttgcccaggggtggagatgaaacccaggcaggaagtctgagactgcactgaggggttgaaggatgggatgatactctgcagccagcagctctcttcctgagcctgtctttccagcctctttgccctgctgaagggaaaagctatggaggctcacatggatacactggaggctcaggcacagccagagcagtaaccccaggacttgtgaccttcggaacactcagtctggtcagcatttggcactgtctcccacccccgaacagggcagacccctaccttcagaaatgtggcaaactactggaatcctgtaggaacctgagagtcctgatgacaagtttcattttgtttacccaaacatcagtcatacttgtttatgtctaaaaactgctccatccaacacccttgagaaatgctggcctagagcacagacagcctcagttaaaatgcctgtgttatcagagagggctaccttgagctactgtttatcaaactgccccaccaagaggccctgaattctagaagggaatgaagaagtttccatgtaggggtaggacaaggtgcgtgaggggagatgtctggggatgtggcctgactcctgagtattacatttctttgatatatttttatactttaatcttaaaatcaaatgaatgatatattgtcctccacaatctatgtgtttccaaataatatgtcatatttctctccaaaccttggagtaacattgatgctctaggaagatgtgtgtgtctaacttggctctcccagatatggactcccaggtggagtgaattgagtttgggaaatacaacacaggcagacctcacattggaactagtttatctggttgacttacccacccagcttgtcaggtgcagagggaatggtacctagacaatttaagtgggacaagtgtgtgaggtgtggacatcagaaaattcctgggccgggccccatgggacaccgtcagacagaaccagctagagagcacaatgaggccctgttggtggggggcaaagggacagcagtggaagggaagggtggggagaaagcaggcttccagagtcacactcctgctgctcgtttggctgccaaagagattgcagaataggattaaactgatctgtttctcaaactgttttataagtcattcttcacttgtgccacaggcccttttgaaaacttcctcctgtaactttgatttacagtgtatttggggtatgtgtctgggagctgagactgatatggagctaggacctcactcactcagtgagcatttattgagtgtctactgtaaacatctattgagtgtctactttgtaagcatttattgaatatctactgggtgaagctctttactaggtgttgctgtttatacttggctccctgaaagtctcccaagtttccaagaaaaaattgcctataagttccctgcctcccaaggtgaccaaatgtcttcatttgcccaggactgagggggttaagacaccagactttcagttttgaaactgggaaagttgtgggcaaattggaacgagttggtcacctcactgcctcccttgctatgacattttacaagaacaaacatgcaccttctgactgtggtgcaggggaagtgccgaggagagtcagggatggtgtccaagagtggaaatgaaccttagggacctatggggagaagaaatgggggctcccagagagcaggcaagtgacagccaggatggcagttgctgggcttctgcacagcggtggagctcatttccctctctggtttctatgtagaagtcctcccacctagcttcccaccttcattactggccatgattttttacagtgtttttcaacatcttattgtatagaatctatataaatgttgataaagctgagctattgaaagatggtgcttcctggcttatggaattattgactttcagactagacagtgatgagaaagctcatctgctcaaagacgcaggaatcctcttgatgtccttgcctctgcttgcagagttctgatggggagctcactgtagcacaaggcagacccagaacattgtagcaccccaggcatgtaccaggtttctcctgtgtggagctgaaatctttacctgcccttccatgtgtgttccccagagtgaagcttgaagctagcagaacccattacttcctggtcacttgcttcactgtttctagtacaatactgtctcccctctcccagaagcccctctaactgtggactgctcagcagggttgaaatagaaaaccaggtagtcagtgccaccctcctctgaaagccaaactaggctctgaaggtgggcgttgctgggacatgtgtggcccccaactcctgatgtcccagatcacaaaggtttcattgctggttctggtcactgacaggagcctggtcaccactcatgtgagtgtctcaggctttgtggcagcagctggaaagtggcccagcagagaccctcccatgatgccccctgcactaggccttgcaagtttgtgatgccctcatcagcccccagatctgtgcccacgtcatctctcacactcctccttcttacccccgcctccctctgttctcacaccccagctctcactgctcagcaactttggaagctttcatggagtatcctagacaggtcattgacttcaccctccagcctctaaaaggacaacatctctctggaggaagtagaaaaggggctcactggagacaacattccctggcttcattgccagagggctaacagagacccctcacacagggcatctcacccagtgctagtgggaacgggtcttatgggtcccagcctgtgctccagggctgcaccccgcagggtggtatgtggcaggtccaagttaatgaagaaccagccttgtatatggcaactactccacctctggaacgtgtccctgacttggaaagtgaactcacagggctgtggttgccaatttcattttcaaattgcccttgatatcaggacgctgccttccgcacagctgagatcgtcctcacagcagctcaagcctccttcttcttcagtcctcagagtcccaggactcccacatcatgggcccactgaatccatgtgtaaatttaatgtgtaggctgggcacagtggctcacgcctgtaattccagcactttgggagaccaaggtgggcggatcacaaggtcaggagttcaagaccagcctagccaatatggtgaaaccccgtctctactaaagatacaaaaattagctgggcatggtggtgcacacctgtaatcccagctacttgggaggctgaggcaggagagctgcttgaacccaggaggcggaggttgcagtgagccgagatcgcgccattgcactccagcctgggcaacagcagagcgagactccatctcaaaaacaaaaaacaaacaaacaaaaaaaacagacaaaatttaatgtgtaaatgtgtaaaatttataaggactggggttgggcattagtcaagcctgttttgattgccttaaaatcacaaatatttagaattcccacctgatatggtttgactctgtgtccccacccagatctcatcatgaattgtaagccccacatgtccgaggagggacctggtgggaggtgattggatcatgggggcagtttcccccatgctgtttttgtgatagtgagtgagttctcaggagatctggtgcttttttttttttttttttttggacagagtctcactctgtcaccaggctggagtgcagtgctgtgatctcagctcactgcaacctctgcctcccaggttcaagcgattcttctgcctcagccccttgagtagctggaattacaggtgcgtgccaccatgcccagctaatttttgcgtttttttagtagagacagggtttaaccatgttggtcaggctggtcttgaagtcctgaccttgtgatccgcccaccttggcctcccaaagtgctgggattacaggcgtgagccaccgcgcccggccgagatctgatgcttttgaggtgtttggcagtttcccctttgcactctcactcttgctctctctccctctctctctctcctgctgccttatgaagatatgccttgcctccccttcaccatccgccatgattgtaagtttcctgaggcctccccagtcatgtggaactttgagtcaattaaaccccttttgtttataaattaccaagcctcaggtagtatctttatagcagtgtgaaatggactaatacaccacccttagcaccaacacatttttagcagcaattataattttctgagctactatcacaaatatgggcacatttcattaggacacacatgtggtaaaacatagggtggtgtatggatatttagttgtgaatgcaaatacacttgaggcctcttcctgggagcacccattatgtaccaaatttactgagataatatggacaagggtaggtcctttcagaaacactgaccaaaccctccctgccatactgtgaggtatgcattgcccacattttatagtggaggacattgggaggcagcccatgggaattgccacattccacagtgacagatctggaattggggctctctgggagtccccgtcttaagattttttctctatgtacttcaccacaaaccacagactgttgagccagactttgctatttgattgctttataacaatggacacaccagaactgcctatttatatctgttgttgtattttcccaagccaaattcatcagtggtggtcctgaaggtcttcattcctcagtttcctctttctttgcgcattccctaacccatggttgtaagcctagacgcacactccagctgtatggcacatgagcatttacgcccttcatgggcgtggggcagtcaagtggcttaaactcttgatttctaagtgaaagaataaatggaaacccagtcagctgcataatgctttatcatatgactcaccttctcagaaacttacagtgaggaggtgacttgtatatccagcaatcagagagtcaataaataaatcatgggacatccatctataaaatacatgcaaatcattttttaaaaagtcttatggaaaatagttgaaatttgggggaagagttcattctctaatgttaagtaaagaaggcaggatggataagcacatgtagagatgatccaaatttgtcaaaatcacagtatacagagaaggaagacttgaagggcacgtacctatactgtgtgtgaaacctataaatggttttgttttttgtctttgtgaatttcagtgttttccattttctacagtaaacatgtcctgtatttatgcttagaaaaatctatccattaaaaagccctacagtctgtggtcatgccccagcttcctttggcaggcataccaagacatctcattgtggtatgtaaaatgtgatgtacgatggaagtggctcttctccgattacctgagggtggaccaaggatgcagctgggattgcagccaagaggatggggttgtctagaaggactgacccctgcagtgccatcactgttcccactgcatttttccatctgttgtcacagttgagtcatggctttccagaaattgaggcaaagtcagataacaatacttgaagtcttaaagggaggcaagaatgtggagccttttcctttctgggaagatcaagaagtgattctgtccaggaatctgctctctctgctcttctggtgcccactcccaggggctggctcagagtgtaggaattcagccctaaggtttggccaaacatcctggagaagcaaatgtatctgattggctccttgccatgtaggaagagtaggcctgagggtgaggtggtgaggacagaagccaggatgggatctgctaggtgctaactaggggtctgttcctgagcctggggttttctgcctgggaggatgtagagaacattcttgggtgggttttcacccagttgttggtgagagtttattgaccatccactgtttgaaaggtaaaactctactagtgtaaacagcaggggtttctgaattttgaggccaagactggtgttgggatggatgctggagacccatttattcattcatttattcttattgacctcctgtcatcaaccactggagatccgataatgaataaaacagagtggactatgcccatatgagtgagatagacagtggacagagcacaaataaatacaaagtcacaaagcatatcatatgatagcaaaaaggatttggttttgtgagagagaatggggtagagacattactggattatatttaatgcatctggggtcatggactgaattttaacaagtcaccttcacggttctcatacagaacctccgtatggggagcacgactgtgaatcagacaaggtccctatcttccttctaaaggctgtggttaggtggggtaagatgaaccataagcagctattgtgaattatggtttccatcaacatgacaggttcacatggaatccctcctactacaaacaccacataaaatagaacagcaccagagatttaaatacatggcagaacttgcaagaaagaaagtgaaatctttaggtgaaagaaatgaagaatgaattgaacacaggaacaatgaggacatcagttgaccctgcacaaggaataaggaggaaatatgtgtggtgtgattagaccagtaaagagatgctaaaggaactcctaatggatgctggaatttagtactcacacaggtactcaaagatgataggggagttgaaactgagacccattcataaagctaggtgccttggtgaaaagggaactaataaaaccctgcccactactccagggtcagcaggggtttgtctctaacaagatctctgggtaaaaaaatttctctgagaaactaaaaccccaaggctatatcacatagaatcagaaacagaatttatgccatccatatggtatagtgatgcttactttatgccctatatagaaattaacttcaaatgaataaaagatctaaatgtaagacctaaaactataaaactcttagaggaaaacacagggaaagctttataccattggatttggcaaggatttcttggatatgatactgaaagtacaggcaacaaaagttaaaatagataaattgtattacatcaaaatttaaaacttctgtgcatcaagtgacacaatcaagagaatgagaaggcaatctacagaatgggagaaaatgtctgcaaatcatatatctgatgaaagatgaatatccagaatatataaagagttcttagaactcaacaacaacaaaccgaatttaaaaattggcaaaggacttgaatagacatttctctaaaaatgatacacaagtggccaaaaggcacatgaaaagatgctcaacattgcaaatcattagagaaatacaaatcaaaaccacaatgtgacatcacacccattaggatggctactataaaaaaacaaaacaacagaatataacaagtgtttttgaggatggagagaaattggaacccttgtgcactattggtgggaatgtaaaatgatgcagctgctatggaaaacagtatggcagttcctgaacaaattaaaagtagagtcataatatgatctagcagttttgcttctgggtatatatccaaaaacattgaaagcagggtctcaaagagatatttgtgcagttatgtttctagcagcaccattcacgatagccaaaacgtggaaataacccagatgtccatcaatagataaatggataaacaaaatgtgtatatacatacaatagaatattattcagccttaaaaagaaaggaaattctgacacatgctacaatacagatgaaacttgatgacattactctaaatgaaataagccagtcacagaacgacaaaatactgtatgattccatttacatgagatacctagaatagtaaaattcatagagacagaaaacagaatggtggttgctaggagctaggggtaaggggaaatggggagttattgttcaaggggtatagagtctcagttttgcaagacgaaaagagttctagagatggatgacggtgatggtcgcgcaacacgtgaatgtacttaatgccactgaacttgagataggctaggcagtggtggctcatgcctgtaatcccagcactttgggaggctgaggcaggaagattgcttaagcccagaattttgagaccagcctgggcaacaaagtgagacctcatctccacaaaaaatttaaaaaaatagaaataaaaaaattagccaggcatggtagcatgtgccagctgaggtgggaggattgcttgagcctcggaggtcaaggatgcttttagccatgattgcaccactgcactccagcccaggcaagactctgtctcaaaaaatagtattaataaaaaagggtaagatggcaagttttatgttacacacattttatcacaatttttaaaatatgtgggtaatcattaagacaaaagacattgaatataccttctaagacaaaagagagtaaagaataaagaaacctaattaaataataaaagcctagaaaaggaaggggaaatggttaaaaataaaataaaataaaacagccaaaaataaacttcatggtaaataggaacacaatataaatataatcaggttgatacaaatctagatttatcaaaaattataatacatgggccgggcacggtagctcacgcctgtaatcctagcactttgggaggccgaggccggtggatcacgtggtcaggagattgagaccatcctggctaacatggtgaaaccctgtctctactaaaaatacaaaaaattagccgggcgtggtggcaggcgcctgtagtcccagctactcgggaggctgagacaggagaatggcgtgaacccgggaagcggaggttgcagtgagccgagattgcgccactgcactccagcctgggcagcagagcaagactccgtctaaaaaaaaaaaaaaaaaaattataacacatgaaaatggactactcattatttcaaagctacagcatctcagattggataaaaaatagagataaaatctagttacatgctctttaaaagagacatctaaaacaatatgacacagaaagattgaaaatcaagaaacagaagaagatgtaatagaagaatgccagctaaagaaagatgatttatctactttaataacagataagaatgtttaaaataagagtgtttaaagcaaaaagaatgccagaatgtgagatgtttgtaatgtctaaaactgacgagggacgaatatacagaatgcacaaggaatcttgataatctacaagaaacctaataggaaatgtgtgaaggatttggacaggtggactggcatgccagctgggctcgccctaccctctatacttttctctgaatgtcatggtcattgttttccactgtaaacctctgtcttctccatggctgagtcatgcttggcaactagaaagtgcctgttttccttcactggaaagcccccaatttgacaaattttctgttagtctcctattgctgctgtaacaaattatcaccacggagtggcttaaaacaacacaaatttattgtctaatggttctggagtttggaagtccttgatttcttaaggtgttggtagggctgtgttccttctggaggctttagtggaggatctctgtttcctggcctttttcactttctagagtcacccacattccttggcttgtggccccttcctccatcctcaaaactagcatgtcaccatctgaatcactctccttttcacctttttttgttttggacccttgcctccttattttaagaatccttgtggctgggcgtggtggctcacacctgtaatcccaacactttaggaggctgaggcgggtggttcacctgaggtcaggagttcaagaccagcctggccaacatggcgaaaccctgtctctactaaaaatacaaaattagccaggcatggtggggcacgactgtagtcccagctactcaggatgctgaggcaggagaattgcctgaacctgcgaggcggaggttgcagtgagctgagatcatgccattgcactccagcctgggcgacaagagcaaaactccgtctaaaacaaaaacaaaacaaaaaaaactcttgtgattaatttaagaccacccagctaatccaggataatttcccaataaaatccttaatcacatatacaaaatcccttttctcatgtaaggcatttatttacaggttctggggattaggatgtagacatttggggaggccattattttgtctaacacatggttcaaccaaaccagagacagtagaagatacacacacacacacacacacacacacacacacacacacacacgaagagattcattacaaaatttggcttacataatttgaggagctggctaagcagcttcaaaattcacagggcaggcagtcaggaagggatgatcccaggcaggctggaactcacaagcacaaaagctgctgtacacagggagaatttctctctctttttttccctctctctccttctgtctgtctctcaacctctgctttaaaggccttccaactgattgagtctggcccacccaaattatctaggataatctcccttacccagtgtcaactgattatgtattttaattacatctgcaaactcccttcacagcaacacccagattggtatttgaataactgcagactgtggcctagccgagttgccacatcaaaaacactgccatgggggccaagggcagtgacactcaagacaggtataggacagaatgtggcagcagcaggccaagggctccaggaatggtgagcatcattgagcaataggaaaccccaaatggaggatgcagggagcagaggtattttgttgaagtcactgatgagaggaggaaggcatgcttggggtaagcttctgcaaggagacctggaatggggcattctgtccatgccttcccacagtttgaaaatcccatgagggctctgcttctctcctatacacaaattctgccagagccataaagatcagacgcccagcgtatcaccagtgtgtagatgtccgttccttatgtggcttaccagtatgtgtcctgtgacctactgctaaggtcacaggcccctgggctgcagacgtgaatccacccatgtgctggaaaggtaggtgagctcatgtctgcttctcctagggctgcaactggtaggtgtcaagtgtttgcttagctaatctttcctcatctaaagatgcttattgatgatttcattcaggagtcttgaaacctacaggtagaagtcccagacaaaacaaaccaggtgtagatgatgaaaccacattcccttgcacttgcctttgagaactccaggtgagggaagcggaatgttcaaagtagttgggaagcggatcagtcctggaatgctcctggcccacaccgacagtgctgccagaccctccgtgtggagttcccatgcccaggtgggcagatggccaaggggagtacagagaaataaaggaattgaatcaattttaccccagagaaagacttttttttttagctgcgctgttttatgcaatagatttgcacaagaggtttagccttgtttccaagaaagagttatcaacaaggaaagatttaggttagagctcaggaagacctacttgggtctaaggtggttgttcttaaagtacggtgcctggagtagcagtgttatcatcacatgagagtttattataaatgcaaattcttgggccccatcccagacctactgaatgaaaaactggaggtggggcccagaaaactgctccaacaagccctctaggtaattacaatataccctaaagttcaagaacatctgctctgaggcaaacacatctcagggcagtgattcatatgcagcactcactgaggcggctgtgatattctggtggccaagttattcattaaagtgatttgtgggaagtaatggatattcaactcaaatggttgccagggaacatgagcttctaaatgtaggagctgtcattgatgggaggaacttcaggagcatcttaggtttgccagggaaggcctcccagagctttctgctgtggcctggggcaaaaactgagggctgtgaacctcagtccctgagaacccctgggccaggaggcaggagggtgctgaggacggagccttctcagcaaggagagaccaccacatattggaatttggagagtctgtaggagtgctcacagcacacaggcttgctgtgctaggctgagttccatttctgtctttttgcccccagatagtttggaaatggcaaacgttttgggaggctggagtcaggagtgttctcactaatgatgtttacaggttcaagttaaatactgtaggtaagcaaggaatttgagaaactggctggtgggggtcccctttgtggctactcttgcccttattttccatgccttaactaaacatttcatggtgcagagaagacctggatgtcctgagtgaccaatccctttcacgagggtggcgatcgctgtggtctactcgccttgttccctggggtcatggcggtggggtggaagagaggaagttcttgttgctgtcatctaaacacggttttctgataggagaggagcaagcatgcctctcttgatctcctgccttgacctctgcatgtaacagtttcctttcctctctcacatcagcctggaacctgggggagcttttctgagaagggatttgggtattttctgtagcattgactgaagcccctcactctcacctttcattccgtttctcccacctttccttacccagaccctgcagatgtttctcaccctctttccctgtctttgctgatctgaggagtagagagagggggaaggcaaacagaggggaaagggaggagaaaatgccttgggagacacagggaaaagtcaaagaggtgaggtcacagaaggagcagccagccctctgttgagaaaagtccagtccggtgcagcctccagtgataaagcagactcctcccatctaaagactagacaaggctgggcgtggtggctcacatctgtaatcccagcactttgggaggctgacgggggtggattacctgaggccaggagtttgagaccagcctggccaacatggtgagaccccacctctactgaaaatacaaaaattagttgggcacggtggcgtgggtctgtagtcccagctacttgggatgctgaggcaggagaatcccttgaatgcagaggttgcagtgagttgagatcgtgccattgcactccagcctggaagacagagtgagactctgtctcagaaaaaaaaaaaaagaccaaagactctgtgtggacccacccaccaacagcccccatggggctccagatccttgctttctcagaagccagggatcagatgtattagaacatatgccaagtgatgaggcctttgtcctcctgctttcttgctaatttagcaagagaagttctgttaggaacaggtatccttgcggctgtatttcaggcaagccctccatcttagcaagggaaatgtgcagatgtgcagagtttaacaaggcacaaagctctggtctcagggagcagaagcaaaaggtagcagacataataagacaagacatttaccttacctacagtctggctcagggagctccaacattgtgtaaagcccaaggggagtttatttcaaaatcccaaatgttgcgactgggttgccattttaaattggggattggtcttggattgattccatgtgcaccagaagggaccttaccttttcttccagggtgtgaggttgaatagttgacagaagtgaggctgccttttcctagagttagtttccctagagttagagtttccgtaggctaaaacccagtgatctattcctaatgctcctgccagttagctccctgcaccgccttccccaggtgtgtgactcaagttgtcacaatctgtttacgaggctggagagaactggtcttattgccctaggtggtcagaaggtgcctagcttctccctcaacacctcccatcggcccttttccctttgctgtatgcacccccatccctacctccctgacccctctcctcagtgacctcctctctgtggaattgaagagaggaccactcagacccgtgtccctggcctgactgcatctgcatgtgctcccacactcccagtgcctccctggacatctctacttggtctcccagccccacagcctcaagctgcctccctgcactcgtccggctccccctggcatcttgagctccttgcttccctgatgtcaccctcccttctcttggactcagatatgcactcgtcatcccccacatctcctaatcatcggccattgcctcccctcagtgtctctccctctgctgtcccctggccactgccaccgcctgactggagggttttgttttgttttgttttgtttttgccttgtcccaagatcttgcgtggcctccgtgcctctagcctgttacagattcctctttctaaagtgtttgacatgcattatctctgctcagaagtcttcggtgatggccagatagagataaaattccgtagcttctctcaggtaccaaccctttttctgacttggttttctcttctcacctacctggaactctctcagactaactcaatctttttcagacctctaatcacccttacatttttcctctcctcatcttgtctcctaggactagggatgaccccttttttcctacccactttctgaaattctcctcatcttcaaaacctcagctccagcctcacttttccagggatctctcctcatcttcctgtgttctgagcccctctgacaccactacttgtacctctccttggcatctgccatatcaccctgagagtagctgtcactgttttgtgcatgtgcctcatcttagtaatagtatgcccctggggggctgggggaggcagccctgctcggcccttggtctcccatgaatgtgcttggtctagaataataatcaataaatacttgcttaccatataatttcaaatgttccttctgggcaaaattagcaataatacacccacccatactcacacacagcccctgataaaatctctccaagctggcaggccaggggaattgtaaactgtgtgcatcattgccagaggaaagcaccatttcagtcatcacagggagacccagcatccatttcctgataagtcttgaacagtgtgtgttttgaactgcgatcttcaggagtgtatctccatgtaagccatgcctggcctggaatcacaggtgtgatggtagagagaggctcacaggtccctgggggagcctgtaagccgaggagtaacctagagaagggatcaggaaaggcatcctggcgaggcggtgttccaacagagctgccaatggagtcagagctaggcaggcaagaaggccagagagggggcaagagagtgctctaggcagagagttagaatacgcaaggagtcaggatccagatatggaggtatggcaaaacgtcagtgtgacagctgccaccaccttcctgagccggccatgccaggggaagaggcctcttccagggatgtgtgctgggaggcacaggtttagaatgagtctggaaaagcaaatcaacatggagctttgtcctttataggatctggaagaatcggtgaattcactggtcggtggagaaatgtctgtagacccactctggtggttgcaagaatttgccatcagcagagaaggcagggcgccattctgcacgacagcttcgagaggaaggagaggaaaaggtttgacttacggggaaaaggaaggccccttcagtttgtgtgggcttcctgtagctacgtggctcacacagaggacaggtctgtgcatttgaggaagatgctcatgggacatgaacagtcagaaccctccaggtgtggacaaaaggccagtgtggacaggagcgcctgggaatgagaaaagaggatgcccaggcaggggagtggagcccaaaggcaagacaggtcaaggggtgggagcagggggaggcaggacatgggcggcagacacaggaggcctggctgtccccacatctgtctccagcaaacactaactgagtaacagacgaattaaggaaatagtgagcaaatttggagggacttgaagaatttaaaaataaagtgactgcttcctaagtcacctgagagccagaaaaggataagcagactctccccagagctggaggaggaaatgtgtggtgggcctaggaaagatgaaatgggaagcctgcgctggaagggacaggattctgccatggaaccaaggggatcccatggcatgtctcctgctgcagctgtgcacctcctggagcctgcctgtatagagcaggaggcggctcttgctgaaggcaggttttctgatgagcgatccctggcataagacagccagcacctccccggcaccgtgagcaaggctgtgagctagggctttacaatgtctccaaacactcctagacagtcactactgttatcaccacctcacatgtgagaatactgaagcttaacataaatagtgtaacttgcccgtcattttacagtctgtaatactgggcaaagtcaagaatcaaattcaggtctctcaacaaagctcatgcccttacccttgccttcaggccaaacctctggcccgggtattcatttcttagagctgccatttaaaaaataccacaaacttggtggcttaaaacaacagagatgtattctctcacagttctggagactcaaagtgcaaggcaaggtgttggcagagttggttccttctgagggggaacccattccaggactctctccttgcttctagcagttgttggaaacttgtggtgttccttggcttgcagacaccctactccagcttctgcctcgattgtcaaatggtattcttccctgtgtgtctttgtatccaaatttcctctttttgtaagaatgccaggcaatggattagagcccacttgatttcagcatggtctcatgttaacttgattacatctgtgaaaaccctattatttccaaataatgtcacggtcatgagcaccgggggttaaacccaccacatatctttatgagaggcatgatttgacctgtgatacctagcaaggagactgggggcagagaatgtcctcagcattttgctttgagttgcagaggcagagggagtagggtggcaccagccgtggggatcatagcaaagagtgctgggggctgcttttggggctggaggtgagaggcactctggggagggaagtggagatccccagggtgtgttgaggatggacatatccaggagatgcggcccttcaggtctgtgtctttggtactttgttcttgatcattggtaagccaagacagtcggttatgtgaccctcttatgatccacaggaggtcaagtggaatctggaattgtgctcagagcttagcacttagggaggactttctctggaagtatcccataggacagagagatttgaatgttggacaaagccttctcctactgccatccttctacctgccaccagaaaaactgggacgagtgaccacagaagtgtgcttttttcccatgtggagggaacctactgtgttgcacactgggtttttattttgtttatttgaccactttatcctggctgccaaagacttgctgtatatgggacgcagttttcagggggctgctcatcacttttggaatgatgaggtcttggaagacagcctgtggtcatgaatcccagatctctcggcaggcaggggaatgccagggtgaccagactggggtgtggaaatgttcccatgccagaaggtgtgtctgtcagcagcaggctgttgcaggggagccgccgcctctgccagtgtcgtgaggttcagcgggaggctaagctagcctgtctgtagcatgtgtgactccggaatgccgtagcctcaggagcaactccactgtcagagcagagcactggggagagccgacaggcgtccatgcacgtccgtcctaccttctgctctcatggggtgggcagcctgcccgccctgcttctaagcatctgttgttttgggtctgattacagactcttgaagctttgttcttagacccccactgtggctttgaaaaggccgagtgtgttgtggtttgttgggaggtcttctcagagtggctgctgccaaaggtggtgggtgggcctaggccacccccaggcagaggttcccccagatgagggctccttccccatcctgccagggcactaacttcttcttgatgaaacctcctcgggctgttcaccaccagccccaaggacgccctctcctcctcactgcaaagaggagtgagtctccagtctcttgcctgctacagaaaaaccttgaaaaggccaagagtcaaaactggctccaattctccaaatggagatggttgtattgggagctctggtatggagctggccctaaaatgtcgacaagggcttgctgaataacttactattcctgcagaaatttggggggagataaatggatacaatagaaggaaaatacctgtttctacaatgaatttataacccaatttgttaattttatattcactcacttatggcgtatgagtgcctaggtaaccagtggggtcattcgctgacatttattcttttcttctgaaatcattcgtcattgtttgtggagaagattactccctgcttctttggtcatttccctcctctgccttgctggcaccacaggtgtgtcctgggtgacagaattgatgtggggccctaaacactcatggtggttgtaattgcaatctgggctcagtgccctgaaggaacaatagagaccaggtaacaggagggacattctttactaccaggaagatggataagtagaagctcaccccaggcagtggggatggcccccacccacaaagactctgagacaaaacatcacctgaggagggccatgcattttccactcagctacagatttctactgcttattttcaagcaatgatgtaagtagcttggtacggagaggcagccacggtggtggggagctcagtgacagggggaggagtaggggtgctttgcctgaattttgatctgaggtggggggaatccattggagggtttttacagggctgtgacaggctctgatctccatttttgaagatcatgctgacacactatatgattctatttatataaagtacaaaacaggcaaactcatctttgctgttagaagtcaaaagactggctcccctggaggtgtgtggtgactgagaggggctctaggggtttctgggaagctgatgatgatctctttcttcatctgggtaccagtccctcgggtgcacctagcttgtgaaatgtttcaagctgtactcttatgatttatgcatttttaaaagatgagtgttatatatcagtaaagttcttgaaagattactctggcagttggttaaagaatagatcagaagaaaagagtaggaaacgggtaggaagtcatgatagttggccagatgagagctgactgggacctggactggaggtggccaagcaggtggagcgtgcagagtggacttggagcttggtttggagttggaagaagcggggcaagaactggaatggggaggagacagtgtgaggtcccaacaatggttgggggcatggatttgaggaactgaggggaagtcagagttgaaatgtgtaagatgcagtttgatacgaggcctggcagacttcagtgtgaagcccagcttccccccaagggtgcatgagcagggcacccatgggagacatggcggaagatgggcacaggactaatgacagaacccagacaccatcaacatcatgtggggagaaggaagagggctgccacaaggatttcaaagaaggaacagtcagagagagagagctagaacacagggacagcaagtgacatcacaaatggcaaggggaaccctgcagaaggtaggtaaagccattgttggagggcccactggacatggcactgaggtaactggcagtcttggtaaaaacaattcggtagcacattcccgctcaccccaggcagcatggtggagcaaggtgatggatttggcatcagtagcctgctactatttgccaactctgccctgagcctcagtgcctcaactgtaaacaaaagggatcacatgtacctctcagggctgatatgaggattaactttattcagcgaatatttattaaacatttattatatctcagatagtccgccagacacagaaaatacagagtgaccaagagtgacaagtggggagacagaaataagtaaatcaatgagttgatgggaagaaaataaatgccccccatgcttccctgcagccaccacccagccttcttggactgcagggtccctcctttcctgactggattccttggggtcagctcctaagatcctagctcttctgataccatgtccccaagccccactttctcactctgaaaaactagcttctctttccttgaaggcaggaagagaagggcttaatcttcaaactcttccaggatgcaagaaaaaatattgacatcccatcctattattagaacaaagagtaggaagaatataaaatagtgaagtttccatattgatgtttgaataatatctaataggtctgaatgtcctatacctgccataaatggatgcaaagcaggttcttttcaacctaacaaattactgccaagttcccagaaagacaagatggcacttgatgaaaatgtttctggcttaaaaaaaaaattaattggagaatttctaaagaagaaattggacacatatttacataaatatccgtgataattatgttttcaagtgtttttttttctgggaaaccaggcttccagctgacctggaaaattcatcttgtctcacatgtttatgtttcatctcttccagaattttttttcaatctgtggtatctaaagcccagacccttggccccctgccatggggcaatctttcacttgtgagcttccctttcaccttctttcacagacctcaccactccagctatccacatgctccattcctactcctgagctttgaacagggcaccattagaaaagaaacacaacacaaaacaacggaagcaggatatttcccttaccccttcacgggcgggaactggagtgcacgggaactggacctagctggtcgcttcggcactggcaaggatgaattccactcactcaagtccactgtgttctactccctggggagggggagcacaggtcagcgggtgcaagagctctggggctagtacttttggactccagcaggagcaaaactccttgtgggccccacggcagcatctggaggtggggtgcccatgacccctgaagccccagaaggaatgttacagtgcccttttagcccatctgtggacggcttaagtgttaacagctcagtgcagggtcagtgtgacagcactcatgacagcacccacactcatgacagcacccacactcatgacatctgaactcttgtctggcgtccaagagtaataaggttgcacgaacggattgaagatggcaaatgcaggggatttaacagccaatgaaagtggctcagctggaaggggagctgaaaagggaacaggaaggtaatattccctggagtccagctgtccctggacagacacctctctgaagctacactgtcaaactgttcctctgaagtcaagatgcttctctccaacatccaactgtagtctctgatgtccagctgtttctcctccctctgctggcagagcctggggtttttatgggctcaggatgggggtgcagggcgggccatgggtggttatggaaaaggcaacattcaagccggaaaacaggaatgtaagttctcactttgggccacagttccaggcttgagggtggggccctcgccagggacctgccctcttctgcctgcctggaatttttctgcctcctgtccctatcacagccacaatacaaagctttttaggatgactggtgttattaggagctaagaattttttctacctccctttcttgtgctctatcttccttcaaacaatgcctctgcagtagaaatctgtttctttttcagattgtcctgacctttgtcctttcaagggcccccaggagcctgtcttatcaaaggcttttttaagcttataataacacaaggtgcaaaaatacaaaataacaacaaacactacagaattatgcagtttgggatttccagtgtccatttaaattgtatcttatatgatgaccttcaagtgatttttgctgaagttgagcgtactaaactaaaaaagtggtcaagagatcctgggcaagtccgattcggtcaggactttgctcagagagttcccctaaccagggttccccaggcagtgttaaaggtggaaagagaatccaccttgcagtttgcttctctgtgcctgttgtggtttcctgtggcctccactgaggacagatgtgccagtcctcccagaagctgttctcataggcctcagagggtgcctttgctcagtcatattggggaactctgccaaacagtaaggtcaactttgtgggcagtaaaggctggcaaagggaatctggagagaagaaagcggaagagttacactgagcagtgagagatctgttggaggcctggctcctccggccccctgcagcctcccctcccaggcagggtctcaggcccagctccacagcctagccactcccctcttaaggaacaaggaagctgtgatggaaatctatgtgtttcttcctagattgttctgatttttatatctccagtgacccacaggaccatgtcttatcaaaggctttttctaattcataataaaatgaataatactaaagataccttttgtcattgctatgaggaatatcaccaactttgaccccaggctggctattttaaatctctgaactttatcttgtgcaggcattcttcctgcgtgggaaaatattggatttcctgaatcacttcttgaaagagtcattcccctttggggcattgggccatggtttagattcacagccacaccctgcagaagggacaggaggggtgagcaggccaacggctgatggagggcttttattctagaatgcactggactcttgctttgcttccttcattttaggggttggggacagggagaaggatgctactccctgcttcagctccgaggatctttcagatgcacctcagaggagccaacctagaagcctgcccaccttcagatgcctgcagttttgttttttgcttgtttttttttgttttgtttttttgagatggagtcttgctctgtcacccaggctggagtgctgtggtgcgatcttggctcactgcagtctctgcctcccaggtttaagcgattctcctgcctcagcttcctgagtagctggtattacaggcctttgcccccacacctggctaatttttgtatttttagtagagatggggttttaccatgttggcgaggctggtcttgaactcccgacctcaggtgatctgcccgcttcagcctctcaaagtgctgggattacagcagtgagccactatgcttggccagatgcctgcatgtctgatgacactgggaagcagccaggagtcacccttctgagttcacttctttatccttattggcctcttaagccccaagcctcacctcccaggtgaggagaactgccagccaggaccaagaatgagttgtgtgaaggcagacagtgcgatggagaagtggagatgggcatacacccagagccagcaccactctcaggccacctgccatctgttggagacacaccaggcattttggaagacttagtcaagtaaaggtggtatcgggactcatgagtgtagtgggaggagaggaagggttcggtatattttttggtttgacagcctagtccactgacaagtacatatttcttgaagcctttctttttcccattgaaaaacgggacagaatgatttgtctgctaggtttagcaccaggaaatagattggtttatgattcaagattgctgactgaacacatttgtctcccctcctctctgacactttcattataatgaaactaatgaagaaaaaggagaaaaatcaatgacaaaaaactgaagaaggagggagactatgagtggatgaaagatttcaataatttcagcagggtggacagtggttgggaagtgttgatggataaaatagaatggaggaagacagatggtcaactgcgtgcacggggcctgcagtagcggggagcccgcgggcttggcacagcccggagaggcaacagatttagaattggcgaacgtggcagaaggagaagtgagattaagggattaagatagaacagccctttaccccacggaaaacacaagaaaccttctctcctagaattaacgggaactatcacacagtgtgaaggtttgtgcccaggagggaagccctgctcctctggctcccagtttgcttcccacaaagtgatctgataataaaaatactgatagaactattaaaagttgggaggagtagggagaagggggctttgcaattataactgtgctaaatcctcttctgtagtaacaggcaccataaaatggtaagtcaagaaactgcagaacaagtgtattattttgagatgtgtggatgtcatcaacagaaaaactaaaaactaaaagcagagggggttattcccaacctgcggtactggtggtgggctgacttgagtgtagagttgggctttgtcattctaagcccttccacactacttgatattttaaacacatgcacatgttacactgattcaaaaaaataaaataaaatgtggaaagaattgcaaattgattttaattccataggtgggttccagttaactgtggaatgggaggactggatgcctgtccagtgttgctcaaatccaggggggttgtcagtgtggttgtgcagttatgcttcttcccaagagagggaagtctcagaggggtgttaccactggagggtcttgactatgagttgtccaggtccttggcattttgaacaaagaactgaacaaaatgcagaaacaaagtaccaaaggaatgaaacacaggaatgaagcagtgaaaacaggaatttattaaagcaagaaagaactccgcagggtgggagtgggccctagcaagcagctcaaaggcccagttataaagttttctgggctgtaagtaaccatttgaggttcttccctttatctggatgaaggatttggcttgtggctaattaaaggctgaggtgaattggcgccatatgcagataaagggaaggtccctgcagggcccgccggccaatctaaggcactctccttttccatctgagacgtggtggaagggggagggttgcaaggagagtagcctttgatcctttgttactcagagtgggaagatggggttttcccttttgctttagctttaggaagtttgtgttaattggcattagattccctgcccccagaccttgatgttttctcttttaggaagttagcacaaaccggccttaagttccttgtctccagactctgttctcctgtctcacgtgttcccacctgtctggtatgcagtcagctcggcctagagagcagaagagcagaatgtcccctgaggccaaattgactttcagaggttgggagggactaaagccagcagcacatggctgtcccctccctctttcagagaacagcagcatggtcctcagtaccccgaactctccctccctgcatcctgttgtcgacaaaaagagtcaaactctggctccgaatacatctcttcaaatattttacaaatgtgagtgaccatggcctgtgacacagccctcagtaagtcctgagaacatgtgccatggtggtcggggtgcagctggttttatacattttagggagacatgagacttcgatcaaatacattcaagaaatacattggtttggtccagaaaggcggcacaacttgcagtgggggcttccagcctatagtttaggttcaaaaattttctgattgacagttggttgggtttatctaaagacctgggatcaatagaaaggaaagtctgggtaaagttaaaataaaggattatggagacccaagttcttatttgcagaggaagccttcaagtagtaggcttcagagggaataggttgtaaaatgtttcttatcaggcttacagactgtgtcaatgttaatgctggagaggtataatgaggcatgtcaccttattatactcccacttcctgtcatggcctgaaacagtctctcaggttaaattttaagagtgccctgaccaggaggaagtccattcagatgcttggggcagtgagggggaatacttagaattttctttttggtttacactcagtgagggtgagaataaggtttttctgtgctgttcttttcttctcccttttcctccctcctttcttccttcctttagaagaactgtttcattcagattgccctgtcagagtcctgtttgggaaagcagatagctgccatttagggatagaatcagttatttcaaactgagaggtcaccggctgtgtgtctcagtccagccacatctcctgccctgaatggttttcctccaactcctggactcttccagtacattgaatcacctcagagaagttgcatcctagtggatatcgatgaaaagagtcaaactctaagatatttgaagagatttattctgagccaaatatgagtgaccatggcccgtgacagggcctgagaacatgttcccaaggtggtcagggcgcagcttggttttgtacattttagggagacaggagacttcaatcaaatacatttaagaaatacattggtttggtccagaaaggcgagacaacttgaagtggggtggggggaggacttccagtttataggtagatttaaaattttctgattgacattggttgagtttatctaaagacctgggaacaatagaaaggaaatgtctgggttgcgataagaggttgtggagaccagggttttatcagacagatgaagcctccaggtagccggctggcttcagagagaatcgattctacatgtttcttatcagacttcaggtctgtgttgatgttaatgccagagaggtataatgaggtctgtctgacccccacttcctgtcgagacctgaaccagtctttcaggttaaattttaagagtactctggctgaggaggaagtccattcacaatggggatgggtgggggtggcggggcgggggcgggggggggggctttgaattttatttttggtttacatggacataagacatcagttgaaattttctagtcttccttccctggggtttgtgtggaaaacatcagagtgggttgacagcacagtcagtcattaaataggtaataaccctatggggatcacatttcagaccttccgctggtgttcctataaccacggttagatgccactgtgacctaacaatggttagatcgtagttccgatgtttagtttggaaaagagaggcatgaacatgtagatcaaaaaaagccatgtctagactgttctttgatgctttctccttcatcctgagctgtgggagcctccctccttgtcctgtggcttatccaccatggtcatctcacttatgtcactgaagcgtggcttgggccaagtcccccacacccccaaatttaccttgcatctcagtagctttttagcctttcttagctctttgacacgggtggtaaaaagttctctctttattaaagaacttcgtggccactccagtttccccgcttccttcctctttatatgtttgttaggattggagaatgaatgaggccgtcatgagcatggccttgacagttagaagcctgagtgcctcctgccctccctgccctgcaagaatgttgctcgtcctctgtggggtttctctgccagcttccttctataagatgtgtctcaagtgatgtgtttaccttaacacacacgcacagcccttgtcaacctagatgtttagattagcacacacacacaaacctagatatttgcctgggttttgaacctgtcaaaataggactcttgaataaacaaagttattccaatgacattgccaacgctcatgattgaaaaaacaaaaaacaaaaaacaaaaaactgtttgtcaaattcccttcaaagccccagaacattattttgaatacctcatggttgcaaatcttttttcaaatgaatttcttctttagccaactttattgaggtatctagtttacatataataaaatgcacacactttaaatatttgttgagttttgacaaatgtataaacctgtataaataccaccacaaaattaaaaagtagaatatttccaccacggtagaaagtcccttcatacatggctgcaaatcttatttcagtttgggtttagccaagtaagtaagtagggcagctgaactgacaaatgctgttttgtgccttgtaagttgtgtggcttgtagattgatcagaagcagcaccaaaggggcaaatgtataaatgattgcagacagaccactggaacaagtctgcagcctcccagaatgactactgtggtggatgtatattctggagcttggacttatcagttagagtactttatagacatattgttcatttgacaaagattgagccccaattttgaactgggcatcatttcatgcactgtggatttgttctaaaaaacacacattgtatttccaccatgaagtctatattctggtgggaggaaatgtcaataaatgagaaatcaaacgcatgatgtaatttggggaagcaatacatgccgagaaaagaaaaaaagtcgagtgaggagatagaaaatgatggtatataccattttaaagaagataatgcagcccgtgtaattcatcttcattttcttttccttttgtgaagaaattgcaagactcaaattctaccaaaggtgttttataaaaggcacatgttatctttccataaagtgtattctggagagtgctagcatctattataaagtagtggtgatgtgtgtgtggatgcggagttacatagttaaagaagcatgggaaggttgacttaaacaacttaactaagtctttactacggaactcagaacctttaatatgcaaatgtgattgcacatattcgtgagggaggattgtagtacgttatgttttccaatttgttttctccagggagttgtttggcctagagcatcttaagcaagtgatgttctggtaacacattgtgggaaattctattctagggttctcagactaccggagaactgaaagcaaccgggaagttaaattactcagagggcaagaggagggagtggaggtagcttcaagttactgaatatccctccaggatgtggagcactcaccaggcaaggtgtgggacgggcaggtggcaggggcctgcaacattctgtggtgcaagcctcacaactcaggtgttatcatagttttcacttgctaatgggaaaacctgctgctcaaggagacccagttggtagccaaaggtcacaccatggcttacaaagtcaagacctgaacctaggcctgtttgactccaaaactcaaatcatcaaaaactataacactatattgcctaaataatggggaagggtaggttgcaacccaactagcaaaccttttcctcccaccaatacatctccatgtactcttgaacctgtgtcctcctcaagggatgggcttgtgttttatctgcacggtgtcaagtgttgcttgctctgtcacatgctggccatataggaggtacttggtaagttcgagcagccgaggtcatggtcccatcacataagcttagtatgtggggccagatggctgtgaccctgagtggccctgacagaaccatccatcgacttccttcccttttccctgccttttctccctgccttttctaccttgcagccatcaatctgatccctctccatatccactggaaccaaggggtccagatatatacaaacacctctgccagggcccccatgaggcacccagacctgacagggcttgcaggggccaatagctggtggcgagattggctctgtgaaggggtgggggatgtggaaaggagccagctctggctagagtctttcacccagtagcacgggggagaaagtgggggaatttctgtacttagaggcatgtctttcaggaaaagatctgagacaaatttcctctcccaccatccccatcttcctctcatgagacaactggagaagttggtgatgattagtcactcctgttaattcattactaatttggatggagggagactggtttttctaagcctcaagctcagaaactcaagtgctccataactgaactctcagtccttgatctccttatgctctcctccttctggatcccccgtttccatgcatgcatgcctttgacctcttcctggccctcaggctggaaacagccccgtctcttctttcacgttgaatcggtgacagcggtgtcaagccagcctttgcaagagcctctaatttggtgcctctccagacccactaccccagccagccctcgtctctcccaaagctgtatgacagccctcattcctctgctagatgctactcttgccaccagccatgtgccaatccttcagatgcttctgtacaggagtcagcacagggtgctgggatttttagaagcaaccttgaactagacacacaactgatctccatgctgggccccacactgctcctgaagggcaggggaagttatccagacaaagaaggggaagactgtgagcaaaggcactgacatagggccttcagggaactctgagagtgtgaccttgatgtgtttgaaggacaaggtggcagcaggtgctgcagctgtctaatgctgcataccagaacaatccaaaacttggtgcttaaaacaatggccacatttaggttgctgacaaatctgacaaatcttcaatctgcacagggctcattggggtagctcatttctgcttcacttggcatcgagggctgggactggaatcatctgaaagctggctcagtaacatgtctggtggttgatgctggctgaggaccaaaatctgaaccgagttatccgtggaacattaacatgtggcctcgccatgagtaaggaagactgggcttccttatgatgtaatgtcggggtactaagggtctcaagggagaaagagccagccagattctttgtccacttttaggatccagcctcggaagtcacatagcgtcacttctcttcattagaagcaaggagctaagattggcccatattcagagggagagaacacagaacccaccccttgatagagtgtcattgtaagaggtgtatgtggatgggagagattggtgtggccatctttgcaaaatatgatcagtctcagcagaaaatatggaggcaggctgggtccaggactgtagcatcttggctatcacccctcacaaaccaacacagctgtttggctaacagcagtgttggtttttaccttatagaaaatgggacgccagtgagagaggccaattcaggcgtgacctgctcgtgtttgtgcttgagaaagctccccctggggtggtgtggtggaagatttgagaggagcaagcaggggacctgtgagaggctgttgcagtgatctgaggagggatggtgagggcctgagccaaggcttacaccagtagaagaggcagggctccaatgtgggagacaccaagaagagaccatggggctgagggatggggcaaacaccagagggtgaggaggagggacatcaagaaggattattggtttctggcttgggaaactgagtgaaggtgatggggaatgaaggaaaaatgggagcagtttatgggggaagatgatgagtcctatttgggaagtgattagtttgaggggcctaggagtgtccaggtggatacgtctagcagacagtggagtggacctgcttgcaaaactctggcgaaagttctgggtacagaactgagattggaggccatcatcctatggcaaatgggattgcctatgagcaggtgcagaatggatcatgtccagagaaggggtctacaggcaggctttgggggcattagtctttagggagtggctagaggaggaagatctggcaaggcatctgaagtcaaattgtctctttcccaggtctggcctggaccagggaacaatctgggttcaagtgagctttggtgtcctgtttccatggaaaatgacagaacgttgacaaatcccatccccatcactgtcacagtcttgtgctgctttcttataacctataacctataatgtggctcttgtctttccttcagccttatagtggcaattcctatggattagggaatttctatgactgtttttctttttcttgttttgttttttttttttttttttttgagacggagtctcgctctgtcgcccacgatggaatgcagtggcacaatctcagctcactgcaacctccacctcccaggttcaagcgattctcctgcttcagcctcttgagtagctgggattacaggcatgtgccaccacgcctggttaatttttgtatttttagtagagacggggtttcaccacgttggtcaggctggtctcgaactcctgacctcatgatccgcctgcttcgaagtcccaaagtgctgggattacaggcatgagccaccgcgcccagccttgcttttctttttctaatctttcacatcttaccctttacaaggatggtcagagccagaaagagtcttctagtccggtgactggaaaccacgttgtcccccagactctgctggtagaagttttccaaataaagcatttgaggcttcactcctgctgattttgattcagtagatctgagcttgggcctagcctctgtgtttcaaaggcactcccacctccccatccatgtgattttgaatcaaagctgagttatgaaccattgacttagtccagttaccttgcagttgggaaaacccagggcacagaagggggaaaagcacacacaaaccgagattgttccctggtccaggccagacctaggaacgaggcaatttgacctcagatgcctcgccagattctcctcctctgaccattccctaaagactaatgccccctaaactctaaactctgtctctagacagagacaggaccctttctggctaagcttgctctgttgaataagaggcaggtccagatctggtccatgccaagcgtcaggtgactagcatctaagccccaaagtgcctactgcatacagggcatgggttgggcacttgggttaccccttgctggacttcagtttccccatttgtgaaaagagagtgggatgacattattacaaaatattaagaagaatttcagaatacaaaagaaagcccagtggagcctctctagcatggcaggggtggagtgccaccatgcccccagacaggcaggcttccttctaccacctgggaggagtggggtggccacacaggttcaggtggcagtcaggagaggtgtctggttttgtgggtgtaaagacctctccagacctggaggctgtgagcatggacacatggataggcagtgagttctgggctctgtctgacatcccaagctggcctcgcaaaggttctgccctggcaggaaggaaaccccacagcctggaacaagggcacctatagaggaaggctcagcttcggaaggaaatggaaatgaaggtggagccccggttgctctcctgtgatggcagctgttcattcatggaaagagctttggaagactgtgaaatggcacagcactcacccttccctggaggaaaacctcacccagaggggcgccttccaggagatgcttgagaataggactcctggctcagagcctgttcggtgtcagcgcaacagctgagaacctgggggagcccagagctcagcctggagccaactagggacatcatgaaacccttctcctaccctccctgatgtgttatctgttcccatccaccatggaactcacatttactcagtaccccaggaccaggtacgaggccaggtgagatacagagataaatggccttggccccttccctggggccttgatcatccattgagcaggcagcaagcacagtcagtcacagacattcctgagaggccaagatagtcctggtaagagatgaggacatggatgggaacattcattcaaaccaggtgctttggggattgcatcatggtgccttactggaggcattagaggtgggcctcagaggacaggtgttgggaatggaagacaggtcaagagagatggatccatgtgacccgggcttgttcatctcccaagagtggtctgaattggatggggagtggccttcagccctcacagggcacaggaggagggcagatgtgcagcctgtggagcactgtggtgctgttggggaataatccaagatgctcagctgagcagttaggcccttcccttgggggtgagtccccaaccctgtcatatcttcaacaccctgtggtttcactgggccacatatcacagcagtgataagaatgcagtaataacaggaatggctagcactttaggagtgcttcctgtagggtgcaacacaatgttgcaatgatgacgtttcatcctggagaccctgggaagtaactgctcctagataacaggcgaggaaacagaggtcagcctgccggggcccctaacagatggctgggagggcgccagggcttgtcgtccagaaacctcacgggcccatcactcttcccccaggtgtttgtgctctgccaaggcctcctgcagctctgccaactcctgtacagcgcctacttcaagagcagcctcaccaccattgagaagcgctttgggctctccagttcttcatcgggtctcatttccagcttgaatgaggtgagcaggaggttctggtccatcagactccacttgtgcaccacgctgaccacaagatccaggagaagcagaggaacagggggctgagatgtgcacataggtgcaatgcctctttctgccgggtaacagcaaacgaaacagcaaagatccagtgggcacagtgagagcagctagatttcctgaggcctgacttgtgccaggtactgagctgaaagcctcccatgcctgacctgggggcctcttcatggcagccttgccagcaggtactatgttcatgcccacttcacagataaggatgctgaggctcaggagtacaagtggcttgctccaggtatgcagggctgtccgccttcaaattctgtgcttctaatttagttctgtgcaatctgccagcctgtggggcccctgccccatacatagtctagagaggataagccccaggcatgcaggtgggtcagcagccctgggcccaggcatctcctgtcttatgagggccacaagagccagagctcttaatggccttgactccctgaagagatcagagctctatggcctccgagcatttcctgccatccctcagtgactgcatatcaaagttagaggaagacaagatgggccgagaagccagaggaggtgggaggtcagagggcagggcctgccaggagccactggaagctggggagagagagtgagcggaggcagcagaaccccttcatcctgtctccatagtctggagacagggctcctgggctggcttccatcttctccccagggccactcttcctggatggaggcaggcagtggtcccttccccagagccgggttgctcctctggagcatcatgaggtcttcccttgacttagtgaaattcaagtcagtgcagtcacttagagcccgggcccctgtcctgtggcagcttctggccaaaacagaactgtaaaagaaggcaggtatctcctctccccagccttctcctgctggaataaggctttccctttcacccctcccccttccttgatggtccacatagcagtgaccccaggaccactttcctgtgacagtcccttctacggtcctaggagggaggcactcttcacagtcgtgtttctcagacaaggaacccggcatcagaaagcctgagtactccatccaggtcagccccctgtcatgtgcatggtgcagccagggtctgagcccagggctgtctgagggctgcatgccgaggcctcctctgtggattcctaactgtcttctctaccgttcctccagtctcttgctcacaagcactgctccagccagtctcaacctccacacacatcgctggaatcttcattggtgcccctcacttcatgggcacccctccatgggctctttcgccacatatatgacatgcatgcacatatacacgcacagtcctgcagcctgtctaagtcatccctgctggcctgagacctcctcctctgagcttccaggcctatgtgtgtgccttccctgctttctgtgccaggtgtgtgtctgtgtactggtctgtgtgtgtgcctgtgtctctgtctgtctgcttgtattgctatcctgagcttcctggtgatgcctggtgactgggtctgcctgactgtgtggttgcctccttttccaggacagcaccctggtgtccctgccctgcattcacacagaatgaccctcatcgatgttgacctctgactttggtaattcccctggcacatgttgtcctcactcatgatggatatcagggaaaacaaatctccgacatttgcgtcaccacggtcttgtttcatgaccctggcaggcatccctaattacccaccccatccctttcctgctgagttcatgcacagcctcagaatccttctcaacacaatattctaggccttgctactaatcaaagtcagagctggcatgtgaggtgaatcttctccttcacctcagcccaggtggtagccaaatctgtgatctcccatggttaaattttcattcatgttgaccctatgcttggaacaaaaatgtgggcccggaaacaactggattcctcaatgggctgggagtagctagctaggacttgtagcaggatctgcttaagacaggaggttgattaggcaatgaaagagcttaatattttcccagggatggagttcaatcagaaataaaaataattcacccattaaaatctttcccagtctcagatgaacttttcaagaatctgaattcagctcatgcctgtgggcatgatttgaagcaaatatcatcagatagttcactcctctgaccttataaccctctgtgtgtgtgtatctgtgtctgtgtatgtctgagtatttgtgtgcaactctgtatgtgtctgtctgtgtacagtatatgcctgaaggctaggggggatgtgagaagagagcccggcctggtgcaaggggaaggtgaggctgcccgggtggtggagtgtgcggtgaacctccaggaagcatgaaccttcagtctgcagcttccagtctcagagagccttctgggggcccagtaggtgaggtgaagcctttgacaggctgggcgtaaaaggccagcaccagcaggaggaacttagttaagaagagaagacatggagcaacttggcttgaagcagcagcttctcttgtccactacgaaaggctagggctgagccctagaggctgcctgcccttcacgccacccaccagttgtccctgcggccctttggtttgagatgttgaagggcaggggcatgtcatgatgggcattgtaacagctttcaaagagtctcacagcaagtccatggtagtgttttaggggctgctccagggctgaggagactgaggtcttgaggctctcttctcagccggaacagctgcatttggggggttgttttatattagggaaaaacagttttttcaaagggactctgtggctgaagaaaagtttgagaacaaggtcttaagccaacattagctgtaacacctgtggaggttcagcttcccacagagaaacaagtgcaggcccctggagagtgcagaagagcttctcctctgtccctcctccctgagatccccttcggggccctccactgaccctcacccaggccttctaaagtcagccacagtcagcacagctgatatgatctgacatttacaatcattttatgaaaagcaatacggaaacaagaaggaaataaacgaaatctgggaagcataagaataaagctctctttccaggtgtgggtttcaggatgtcctagatccacctttggcaggagctgcctctcacacaccttcacatcccctttctctgtagatcataaaccatctcactcttggccatgctggaggggtctcctgggcaactatgtcctcctcttgaaaaagtctaccatttactcattcattcatttgttcaacaatatttaacgagcaccaagtattaggcactgttctaggtgctggggaaacaggaatgaacagacaaaaatctctgctcatatatcattctaaggataaatatagtatttatggaaataaaacatactgtagatcaggttatgatgagtgcaatgaagagagagagtcatggatgggaaaaggtatacggggcctcagtgttggggatgtaggtgtattttaaatgacgaggtcagagaaagaccttcttgagatgattcaatctgagcagaggcctgaatctggttaagaatggagtcctgaggacgtaaagtcagaaggagcagcaagaacaaaaggggctgggggaatgcctttgttctttggtgtggtcaaagaacagctgggggcagtatggctggatggagggagggagaggagcagaagagtgcagacctgagaggtgaccagggggcaggctgtgtaggactcgggaggctctgggacagcctttgcctttttccactggagggtttgagctgagggaacatggtctgatagttcagcaggacccttctggctgctgggtggagaatgaacagtagcaggacatgggtgaaggcagggtcccgttaggaggctaccacagtaattcagacaggattggaggttgaggaatcactggcttccaggtggctatggaaggtcctgccaaggggatttgctgatcgattagatatgagtgtgagagaagtcaagatgatgttcgaatgttttgtgtgagccactgggaggatggaggtgccatttactgagacaaggaggaccaggacaggggactggggttttggaggaaggaagaagagtgagagtttagatgagctgagactgtgggacttagaagcacacgcagagcataaatagccatggaactggacacacttaggggcagagctctgggcccaatgttgagagtccaaggagataaagaggaataagccaagaagaccgagaaggagcagacaggggaagggaagcaggagaggatggtgtcatgggaattctgaaagaagtgtttcaggaaaaaagaaatggtcaactgagtcaaatggaactgagcattgaccagtacatttgccaatgaggaggccactggtgaccttagtgacagccatgttctgaggctctagcctctgtttcctgacataggagtacccgtttctccacccaggaggaaagtggggtgtaacaaggcagggctatggctgcagatttacagagctcctccagtccaggtgaactgtgctctgaggagaggaccatctttggtggagacgtggtcagaaggcctggcagcatccccttaccattgaagaccttactccccatgctggagccttcagttcccttccctggttctgggtggggctcagagagcacatcttccagggagcaccaggagcatggagttacccatgtttccagctggaagggttttaggggtgctctagttcttatccttcatttcacagaattgaaaacagaccaaggcaggggaaagggcaggatagtagcagagctgcttgggcagaaaccctcttctccaagaggtggcagacaactctagttaagccttggtgttttagagtcaggcaagactggttcaagccatgccctaacctcatagtgatgggtatgttacttaatattctgaaccccagttttgtcagataaaatgagaattgtttcatgattaaatgagataagcatgttgcttgcttgttattctggccaccaagccaaggtccttgggtcctttaatttgtacctaattaaacttgggattttgcctaaactttaggtacaaactctcaagcttaattagggaatgtgttttattcctaggagccagccagaattggaggtttctttggctttttcccaaaaaggtttggttctaagatggttaaagtttaggttttgagtgtttcataatctccagatacttcctttggtctggtctaggagatggagacccagaagggtttctgataacagagggaaaaccaaaattgcttatgcttgccccttgtgaagctctctgggaaaagctgacactgtaactctgtctgggccccagctgacactgggcagccccctccctttccagttttcctggatgaagtgtgatcgggtcttctctgtgggtgggtgaggacagggcctcttgtctcactcagcccttctgctctcttctcagatcagcaatgccatcctcatcatctttgtcagctactttggcagccgggtgcaccgtccacgtctgattggcatcggaggtctcttcctggctgcaggtgccttcatcctcaccctcccacacttcctctccgagccctaccagtacaccttggccagcactggtgagtggcttccaacccctgcctcaaggggtaaggaatgggtgaacatctcacaaagttagtggggatactcctagggcagtggataccactccaggaagagggcatatgaagctcagactatactgaagtatgtagagctatggagcaactgaactctggtttgttcaggaaagtgtgcagtgcatggctcacctcctgctgtgattccctgtgcttcatgccaggaatgacccaagctccacctccctggggacactgtgagcagtttctgcaatggggcttggcaggaggaggatcaaagcattaaatcatgatgaagtctgtggattttgtccatgtttaatcatagcacttcgtgacatttgtacattcttctgtctttaggtgacagtgcacttgcacgatctcatttgatcatgtttactatgttgagtttgccgatccatgaacataggatgctcactattacccttatatttaacattgatgtatgacttaacaaccactgaagttcattaatgtctctattctccaagagagcaaaataaggatcatagatgcttttttgcccaccatcctctctcatcttccacttatggttgacccatatttttgttctacctctctttaacctccccacagtggtcattattataaattgttactatactgttatttataaataagtgagtggttatttatgtactcacaagtttactggtttctttgttcaccattgattgcttcttgcatttcacccatgctgttgattaatttttttttcctgaaggatatcctttagtgttactttcagtaggcctatgagtaagaaaatctctaagtctttgtccgaaaatgcctctattttacccttgctcttgaattatagtttagctacaaacaggattttaaatcaatagttatttcttctcaacactttgaaggtaccatgcctctgtcttctggtattgggactcttccattagtctaattgtcataccttcttaggtatcctgttttttctctagttctatttagtatttgttcttttcttttctttgttgttctgtatgtctaccataaggtatctgagtatggcttaattttcacttatctgttagaaagttcgatgtgctatttcttttgaaaattagagtttttctttaattttgaaaaattttctgccaaaaacattcctgatattgcacatccctgttttctccatcctttttttctggaactccttttacatatggcttcacattttcatttctggcctccttgtctcttaacctctctttcatagttttcagtgctttatgctgcatcctgggtaatttccttaaagtatgacttcctgttcacttagtctctctccagctttgttaattggtgtcaaacccattttttacattatgaatttgaatggcactacatattttgctaattcctgaagttcttataatagttgttcaaatctctctgctctgtgacactattttttggtgtttccttatgatttcttttgtgttattgatgtcttcagctattttaaatatatttatattatactctttttcagatcgttctagtagctcaagttttaagcatgttaatcctcccattgttttatgtctgcttgctcttgttcatggtggattacctccttgagtttgaccatgagccatttgcagtgggcttttttgccctgtggaaattgtatgtggcctgggtaaggaaatagccctacagagtggtttggcatttacatttactcagcacccaggaccgtcattgctttggaactaattttatgttaatgtgttgacttaggatgaatttgcacttgttttaaggactgtggaaagtggctgtggttttgtgatagacatttgtgagaggcctagttcatagatgctcacccttagtccactgtattggagttgaggttaaatgagcccccagggaggtgctgagggaataatcgattttggtttgcttagaaaccaggctattttttcaatcagatatgtagaccaggtttgagagatgaaccacttagaataatagagggcagcccttaagattgtcaggccagtgatggagagaacgaagtgcctggaacaggaaaagaatagggcaagaatgggggtgtctaatgatgaaatatctgctgggttctggtcatggaactctttcccccacctttttataaatctccagtgaactggtcatttctcataaatgtatggactctgtggggctgaatcctgcttcaggtgggcagaggatgaggaaagatccgagccccaggctcctgccatacactttctcccccttggtctaatgagagcttgaggccagctctgaagcgagtcaggagttgctggccatcttctcagagagcagtgtggccagcctggctgcactgtcttctttccagagccacaatccctgccctttctcgtcacgtgaagactgggataatgaaatcagcaagggagcctggggcactgtggccaggccgaggggagggcctcctgccaggcgccacacatcgtggcctgctcagcctggcaagtcagctcccatggcctgggcccacatgccagtggcatttgcctcacactgagcagccacaggagactggttaagacaacttcactctgttccttgttaggaataatcagtcagtttgggttcagctaaccatgaccctctcagctcagaaggaaacactgtgctgttccagccttgacctcagtgctctaagacaaaatcttctgatagaggaaagaggggctgtgaaaagaccacagcttgcctctcaaggctgcaggggcgcaccataggccagaagagtgggctgttttgtagttcttgttcattggtgcaaattctatatgcaacaatagggcacagcagtctccctcagtctggctgggatagaagcagatgctggaagtgctcagagctgagctaccttcgggcatcttcctggtgccagggggtgggatgagaaggactttggcccaggaacctcatccatgcgatctagctggggctgcacacggtgccagtgcaccacgtgagtgtgctatgctaatatgtgcaaataaaaatatttataaagtcttacttcatgggaatagcttaaaatgtgactcctacttcaaatgtattcttatggaaattttagttttgaatcatgcaaggtcgtcaggaacaaatgcatttcattaaatgtaccactctgagtgggggtgtgaacctgaatggtctactggaaccaggcagtcctcagtctgaatctgagctatgggactcccaagtgggctcgagccacctcctccctgctctgagtttcagttcatccctgagtgtctattttatagccctcgtagggctgcaggggctgagaaggtgcctgttcagaatttagcctggtggctgtcacatgcagtaatcactaagtggtggcttttgtccccacggtggtagggacaatacatgatgttgtgtaaactagtagactttctggatcccaaaggagaaagcaccttacttcctgtgaagaatgtgacagcttatgggctggatggcctggggacatctgaaggcagcttctttctggtctacatcataggtcctctgctctgttctggagcagggcgcctcccttggcatggtccctgctgcatcctcacatgtgagtccttaggatttctgttggtggaagcttaggttgctgttgtgctctcttcccagattcttgtgttggtgtggcctggtatgatgggtagacatgcaccccaccccactccatatggactttaacatttgaatcctagctcagtcacttacctgccaagtcttcttaggcaagctacctcacctttctgaactttagtttccttacctataaaatgggagcaagaataccttgactttcagtgtgttctgagagtaaaagtaaaatgaaataagccaggtatgctgtaatcccatcacttctggaggctgaggcaggaagattgcttgaggccaagagttcgagaccagactgggcaacacagtgagaccccatctctacaaaaaaaaaaaagttagccgggcattatggcacatgcttgtagtcccagctacttgggaggctggggtgggaggatcacttgagcccagaagtttgaggctttaatgagttatgatcatgctactccactccagcctgggcagcaatcaaggctctgtcaccaggctggagtgaagtggtgcgatctcggctcactgcaacctctgcctcccaggctcaagcaattcccctgcctcatcctcccgagtagctgggactacaggtgcccaccaccaggcccagatgattttttgtattttagtagctacggggtttcaccatgttggccaggttgatctcgaactcctgaccttgtgatccacccacctcggcctcccaaagtgctgggattataggcatgagccactgcgcctgacctgctcagcatatttctatttgcctgcccttgttgtggtatttgaaatctgctactcagacctattacttgtgttgattactgattccttcctcttggagtaaagctgctccagaaacgaacatgggaaaggaagagtagcaatgtgttttaggaaaaaaaagttaaagaagggctaaacattttgggaatcacagagacctttaacaactaattgctaatttttaaaaggccatgaagacatttatggatatttagattttctaaatgtcagtggggtccggaaatgtaccctggcgcctttagagaaaaaacgagctatccagccaaagcctctaagaccacgtctggaaggcgcggagaggttttcctctatgggaaactggccaacgtgagaccagtcctcccaggagataagagaaggggcttcggaaaccagtgtctggtaggactaggtgtaacctgtgaatgatccttcagccaagtccagagggaagtctgcccacatgcagacaatggatgccgcaggcaggaagcttcctggaggttaaggaggggcaggggagcactgtatttttggagcagacaagaaaaagaaagggaagagtcactttccagtcctttattcatgaagttgccatccccaacctgggcttgcatatcccaagggtgtccctgggaaagaaggcggtgggaaggcacagggccggggagcctcgggatcctgagtgaactggtgaggacagggagctcagcctttccacagtgaacacccacctatggtgtgagatgggtgtgctaggaagccctggaggaatgagaggggcacccgtggtttgggcagcctgagtttgtttgtgggtaattgtgtataggtgtgtatgtgagggaggcgtgtctatgagtaggaagctaagtaggtgaggaggtgtgtgggtgcggaggggaggtaggtgtatgtggagatgtggggggcatgtggggatgggaaggacttgggtaggaggcagaggagagtaaagtatgtggatgtgtgagtggagttgtggggtgagggttggggtgtatgtgaaggggaaggtgtgagggaagaggtggtgtgggggaaatgtgtggaggtggggtggggtgcctgtgatggggaagtgtgtgtgcatgtgttgggggggtgtggaggtgaggaggggtccatgtcgggggaagtgtgttcacatgtgtggggggtatggaggtggggtggggtacatgtcgggggaagtgtgtgggggtgtggaggtggggtggggtgcctgtgagggggaagcgtgtgttcatgtgtggggggtatggaggtggggtggggtgcctgtgaagggaagcatgtggggtggtaggtgattggagggtggggatgggcagatgtgcaaggaaggaggagaaagggtgtatgtattggtggagggcggggtggagcatcctagtgggagttgcacaacctggccagtggatctatttaactcaaaaagaaagagaaaataaacaacagagaaaatcacaaaacacatgggtgttattaatttgactgagagaaatagagccctgaacggatgagcagaacaaaacttaatgagatttgatgtggaacattttttaaatgcgtggtgtaggaaagaatagaaataaacatggagaaatgatagaaaacactagactgcggtagagaaggcccgggaaggagcgaagctggaaactggtgggagagctctgcgctccatggtgatggtgtgacagcctctctgagggcctgagcctgagccgtgacataaaagtagctgactctctgtcaggcttttctatcatctgtttttgtgggcaaggcacaactccccttggcttacctggaaactggaccccttgttctgcgtctctagcacaggcctggtggagacctaagtgtggaccctcaggcatgcctgatcatttcccttgctcaggaatgaagctgagtgacaggtctgcttggggggagggtccaggaggcaagctgcagcctgctccgctgagagtcgcttctccaggaaggctggcagactgtgtcttgggcccacctgtagcaggaggatggcctccttgggagttagtatccagggtaaaaaggaaagcgggcttctgttccagtggctttgggcatcctgggaacagtgttgagaatgagggaaagccccacagaaaaagggaaatgtggttcaaagaaaccattgatcctccctgcaagatgccttgaggtccccaagcatccccaagggagacagggaggaactttctgctcttgctgccacacttagtagagctgtagagctgggacactgactgtgtgcacaggcatctcctgtggccctgaagccttgaaatgggaaccactgggcccaactgggcagcgtgctacccaccaggaggttggaaacaacaaggagagtttctttctttcaggaacaaaaggacttttcaggattgagagcttggactggacacagtcagagaggatgtgagcctcagaaatctaaaagagggaaacagcaaagagaagttagcgtgacagaggactgacccacaaaccaggacctaagggggctggctggtgctctggaatgttctggagagctccttcctggcctcttcttggcctggggctgcagtgcggagaggtgtgagcaggggactccatactcccctctcatcgtcttgtgctggtgacacctgctcttgtctgtctcatacattgtgcttctccagaagcattggttgcagaagatttggtggctgatgtgtttgaacaccatgggactagaccaggggtcaacagacattttctgtaaagggccaggtagtaaatatgtcagacttgtataccataaggtctgtgctgaaattattcaactttgctgtagtggcacaaaagttccccttcccaatagataagcaagtgggcgtggctgtgtccccataaaacttattgatagatacaggctgggaactgaacgcagcccacgggttgtggtttgccaatctctggaccagacagttctctctgccaggcccactactgccctcaggcatctggagctgaagctcaagaatggggactgtaaggctgcctgaatgtggacagtcatggtttgtgggagcaggcccctccctctctcccatgtcactcgttttcctagatttccctgaattctctcttcctatactccactccatcagtcccaggtcagtcttctggaaccaagcagaaccagcccatcagtccacagtggtggaaacagccatcacatagcccagagcctttgcttcctgagctgctggtctttacacaaaataaggcttccagccctttgggggcccagtgcggtgctgtcagggtggtctccctgagaagaagacagagggaggctcacatctgaatctgagggtcctcctcacaggctggaattgtgaacttgcggtcaaaacaccagagacttgtccccatacattgtgccaagctgactagctgaattccttgaagctacggtcaagcttcatattttctccctgtaggaatcattctccttggttggggtccctccttatagccgtgggtctaattttgagttatcagccgttggactgtccaatcctcccagcttcgtgtcatccatgtcattcacacatttgtaagcagtttccttctttctccaaagtccgtgacaagcgttgagtggcatgcgctcagagcagcttctttctgggtgacgctggcccacgggcacccgagccgggcatgctttgagccagttttccctgaggactccccagccatgtgtcctcatcttgtctagcaggatgtcatgacaggctttgtcaaaaggcttcttccaatcaagtaacaccatgttatggcttcctgctgggtcaggagccccattaacaaaggaaatgaggttggtttggcaagactggcttttgatgagctcatgttggctccgctaacggtttttttttccccctttaaagagcttctcatcagcttactgaataaatctgtgaacaataaattctatctcacacccatcagggtgggggagtactaattaagctcacatttctttgcatgttaaaattaaatggctctgagctgcatcctgctccctcaggtatgtcttccttcccttcatccactaaagaaccagctctgatgatgagccgagccaggtgctggtgccagaccatgtgctgggccagggtgtgggggtgtgggcagcggaagagaaagcccctggccagcaatatagcaccctgccttgttgggcatgcacagtgagcctaccgtcttgtgcccagctcattcatagcacagcctcctcaatacaagtaggcattttccctagggccccctctagtgccaaggtggcagtatgggaagggacatccagcctcagcctcagaactagtcttggaaacccagtcttgagagagaagcagagcagttcctccttccactgccctgagcttcttttcctccacagatgtgaacttctccaagcacactcacttgtcctgtaactgctttattataatccatccattgctggtgaccagcattgatcttactggtatctagtttctggacccagtttccaagttcttaaaggcctgggcaacattgcctgtctccaagcttctcccatttcccttatctatttgagtttctcacagttactcatctctttggatgaaaatcgatctcatcgtataatcactatgtcccaggttataatatactcattatttttaattctcataagaatattgtaagacaggtattatatctgttttgaagacgaggacactgaggttcattccgagaggcctctgactatcaagcagtagagccaagattggaacctcatctgtctggcttcaaggtgtgaatttcttccattgccccacaatgtgccccagactgtcaacgtcaactcattttttcctctggggcagaagactatgttctcctagttttccaagatgaaactgagtgcatttgcccataggaatcattttataaatggaggcttagtttagctggaatagaacacatgttattactggggcattatggattaactaggctttgtggactacactggaaacccaatcatttctgatttgcaaacaacccaatttacaatcgactttgggatctcagatcatgagtgagtttgggacagtctgttccaagcctgccagtgggtgttgccagagtttcaggaggaactgtagagtagctgaatttaggagatgaggaaataagtccttcagagtggaacattctgaatgaggttccaggagtcgtgctgatagtttaagggcttggcaccttggccatgattccagataactctctggaaacacccctgcctttctctgttgttctcttatggattgcttctgaagtttggggcttgctaacctcttccccatttgaccctactcacccacacactcccagatgacagccatgtctccttctgagcagggaggggatgggtggctcttaagagccatgacttgaaggagccctcctctttcctggcagaagtctctctctttgctttactagaatgatgagaatgactagtcaaaggaaagcccctcttgccatggccttctcttgttgcttggtcgttctagggtcccctccctaccccagctctagaccttggtgcaaagccctcttactatttattcccttgacagctggaaggctggcctcagcctggccatcccgaggggtgggacggagcgctgaaacatgtggctttgaacaccggcatggctagaccttggcctgccccagatctaccccatctctggaggttcctttctagggaagtagaccttcctgacagagactcctacatttctaaagctgctgagggtccagaatttagaaatgaaattctgcatatttaaatggtggagtgagtcagagggttgactcacatgctggtggggtggggctgggggagctggaggagggaagaggtccggcctgtttctagttaacatttcacagccctgtgaaaactagactggcaaagccagccctctggtgttctatgggaaaaaatgtgctctgatgaacttgagccttccagaaggttgcctgggggaagatgagaaacagactgatacctggctaagaaatagacgcccctccctcctccagacccctccaagataggggcaggtggctgtgtttgggcaggcagtctctggaggttgtggtagcaggaaaaggcaggcatgttcctgaccttactacaggatttgacttggtggaaaggtcagagttagcaacctctaacctgccatgcttctataagttacgtggagtagctgtgttccagcctttactagagtgcttgcgaagcaatgagaggttgctgtttcttcctaatgtgtgcccgagttcctgaaaaggctggagcttttgctccagggaggagaggtgtggagtggtgcaaagagactcaagtcccccattctgtctgccagaggctgtccattatcaatgtcgctagatcagaggctgcccacggggttggtgctcatacaaggtctttttcttccccttcttcctgccccttgaactcctatccctgtcctcctatttttttttcttttttaaaatgtgtgtcctcttatttttataagggaagagcttaatgttctaaattctagaagacttggctgagcgcagtggctcacgcctataatcccagcactttgggaggccgaggagggtggatcgtctgaggtcaggagttcgagaccagcctggccaacatggtgaaacactgtctgtactaaaaatacaaaaatttgctgggcgtggtagcatgtgcctgtaatctcagctacttgggaggctgaggcaggagaatcgcttaaacccgggaggcagatgtttcagtgagccaagatcatgctattgcactccagcctgggcgacagagcgagactctgtctcaaaaaataaaataaaataaaataaaaataaattctagaagactctattctgaccagagtgagctagccagggccgcccactgccaagggtgtctcaggcttgattgtctgggaagcccacactacatctgtctctgacataaacacctgtccccgcataaggccggttctgttagtgggccacagcttctctgatagcactgacctcggggttgcatttaactgctgttcccttttttatatgtgtcagaacttgatctgggatgtgggatgggtttgggccctattgagttggcataaggaagaaagttctttggaagatcttgaatcaatttggaatgtagaataggccaagaggaactcagtagacttggatgtaattggggcccattgattatttttaaatacatattttaataaaggcagtttctgacatgtaatccgacatttttaaagttagtggtagcagttaaacaatccccagaaagtttcacctcctgaacactgcatgagatgaacttcatgaggatttttgtggccgtggtgcagcaggcaacatgccgtatgaagacttaataagtcattcaatgtttttaccatctttgatgaccattaaataccttgcaaaaaatgattttgctagtcaagtcagcaacaatgttcaaataaatatgtattaaataaattaatgagaatcagtagaatcaagaactagcattcaaaaaacccacacattttctggccctttcttttcccggtgatgtttctcatgtcatgcccctgctatcctacagcagcctggccttgtgtgtctacgcacacaccctctgggctatgcattcaccatcctcgcagccactaagccctgcccctcatactatgcattgactgcttcttgatggaatcaactcccctccttacccgtctcagttgacagggccttgcacattactcctaagtcctctagtgtgttcattgcactgacccctcatgattttcacccttctggagttttccttaggatacaatccaggccccttcccatcatgcacaagtcctccaggggcagccaggcctcaccctggaggacttgtgtttgagcgccagcctcactgacctttattcatgttgtggaatgtaccacccccgcatctgagcccttccacactctctttctctcctcctcacctccccacttccccacccttatcttctatctatgcctgtcgattcttctcagttcagaggccactttctccagaaaccttctccagaatgtcctctcctacaacactgggtctgctgcctctctcatatgctccctggcaccctgtcccagcttcacatgtcctgtgcaatatttttaaattgtggcaaaatatatataacataaattttactgtttaaccacttttaagtgtatagttcagtggcattaaggtacgttcacaatgctgtgcaaccatcatcatcatccacacctggaactttttcatcttctcaaactaaaattctgtatctgttaaacactaactcttcattcccatctcccccagtccctggcaaccaccattctactttctgtttctgtgaatttgacttcttagatccctcatctcagtgaaatcacacagcatttgtctttccgtgtctggcatatttcacttagcataatgtcctcaaggctcatctgtgctgtagcatgtgtcaggattctcttcctttttacagctgtataatattccattgcatataccacattttgtttacccattcatctgttgattaatatttgggctgtttctaacttttggctatcaggaagatagtgctctgaatatgggggtacaaatatctctttaagtccttgctttcaatttttgggggtatatactcagaagtggaattgccagatcatatgatgattctatctttattagtatttatttatttatttatttatttatttatttatttttgagacggagtctcgctctgtcacccaggctggagtgcagtggcgccatcttggctcactgcaagctccgcttcctgggttcacgccattctcctgcctcagcctcccgagtagctgggactacaagtgcgagccaccatgcccacctaattttttgtatttttagtggagacagggtttcaccgtgttagccaggatggtcttgatctcctgaccttgtgatctgcccgcctcagcctcccaaagtgctgggattacaggtatgagccaccgcacccggcccattagtatttatttttttttgagacaagatctcactctgtcgcccaggcagtggcaggatcttggctcactgcagtctctgcctcctgggttcaagccaacctctcacctcagcctcccaagtagctaggactacaggcacgtaccaccatgcccagctaattttttgtatttttagtagagacagggttttgccatgttacccaggctggtctcgaactcctgggcttaagcaatctgcccctcttggcctcccaaaatattgggattacaggtgcgcgccgtcacgcccagtgttgatgattctatttttcagtttttgaggaaccacccttcttcttcccacattggctacaccactttacattctcaccagcgatgcatagggttctaattgctccacacccttgccaacactcgttttctgttttttttttttttggtaatagccatcctgatgggtatgaagtgatatctcattgtagttttgatttgataaagcaatattacggttgcttttttgatgctctgggtaccacagtggaccacagggtttgttaggcacagtacctgtgcctctcagtcatgcccacatctcccacccaagcagagtgcccacccacagccactatcaaccaaataactgagcgactgaagaatgaatgtaactgggtccaggtccttttcaggactccgcgttctccttttcccctgtgacgcaggtatcactcatactgctgctgaggggcagctgctcagacctaggcatctaggcatggtccttcagtggctgaactgggaacagaggctgattctttgcatctctttccaggtattgtgatttgctttaaaccgtgctcccacataacttagacttggtcctgccaccccacggcctatgagacaacgtgccacagagagccactgtcacaccgaggggaatggctcagccaagcacacttgtgaatgacaacaacctgaggttttagggaactcagactttgtttatttctccatacacagtgtacccaagatttgtctgaatcttcagaaataaatacccacttggaaatgtagcagcagcccttttatttatggatgcaaagtatatgtccttcagaaatgcatccgtttggtcaaagttggcacagagaagttagcagagaagtgtgcgtgttgatttctttgagtgactgcacagctgtgttgagtcagttagccatgccaggtcaggtgggtttgtataaatgtttgaacacttcccaagctgagcagctggcttagctctctttcccctacatgcctatttggtcctgagaagagcatggggccatgttacctgtccctcactccctccaaagaccagcatagcctgtgcatataaactcttacccacctggggcaacagccccgggtgtcctgtctggctgctgcactgggggagtgaccagtgagcctaacactctgcccaccagatccaccagcagcctctcaccctctgctgtgcttggtccttccctggagtcctctgagagctttcaaagtcaaaatcaccaacatagagagccacgaattcagggtcataggaatctgggtcccaggctcccagtccaggccttccaacatctgttagccttgcccactcagagccaccctgacctcaccctgggatctgcaggagtcagccagcgccacacccagttctgggtgttggaaatggtccatttgatagattcctgagtgggagggtgggccagacagcccctgtggtctttcagcaggagcattttacaattctgtgcttcaggacccttgcagcatcactgagctgcaccagccttctttcaagatggcagacacagcctctagacctggtgtgggactggcagggtctgacttctcatgcttgggcatctttttggaaccatagtcttctacctctttaatgacacagagaatctttctatctagccaccttatggcctctacgccaagggaaactaaggctcagagacatttagaaacttgctcaagaatacatagggataaaaccaatttttatcttacctagggataaagccaatttcttaactccctgtactgtgtttatttcatcttattgtcccagattctagcacacatcccagcagccagcccctttcctgagaggaagtaggtgtaaggtcccagccacctacagaggtcagagagctcatatgtctgaaggtggctagggatggaggaaatcttcccatgccatgttcttccatccctgaaaaatgtgtgttctgtcttttcaagctgccatcagacttgatttcagtttggactttgagtcagacacatgcaggttcggatcccagctctacccccaaaccagctacttaggtatggtcttatgtagtctcctgctcacagtaacccctgtgagcaggagaccacatacatcacaaccttggcacagggcctggccctgtcagtacatgggtgtttgacatttctggtgctaggacttggatctctacggtagagcctgtaaatcagagagaggcccaacactccacgggggagaggtggtggtgggctctggtgggacttaggctcacctagctcagggcagcacaagtgagaattaaactgaatcccatcagtgttaagtgagcaagatcggtgacgtcagcgatgggttgtggttggtggggatgggcagagactcagctccactgttgcaggcctagagcctagagcagaaagaagggcaatgggaatgggacaaagaagaaatgggagagacgttgttaagctttggatatatttatttacaaaaaccttgaatttaaaaactttgttgctttatttcaaaagtatttcttttaacacaaaagaaatgtgttcattccagacaaattacaaaataaatgaggcaaataaaaaaagatcagcacaatctcatcacccagagagagccatcatcttccagaggttttctctgcatattcaagtagtccacaaacgttttataaattagggaacatattcttctccaagctactagttactatttttttattctaacaagctgttccagctgtctttctgtgtaaaaaaaaggctatattttcaccccaattctaaaaggttgcatattatatcaccatgtggtcgggccactctatttgaattctgcattgaaaggcaggataatgaacatggagtgggaagagggaggtacagagggaccctgactacagtccctggctgcttgccaggatgcttccttccacggacacaactattgaaggtctagatgaccctgaccaaacagacgccttggcttcctttccttttcctgggacaggcttccctgactgatgggggagctcccatgacagcaactttctaatgtgtcctgcatagacaccactggagagggcagacaacagtggggccaggctggacgaggcgtgtgcgactggggagaggggaaagggcaatgaagagcacagacccctctccccagccccaccatccagggcagccctgagcccaacagcaccggcagagtccagtgtgaggagcagggctagtctacggcgctcggttttcctctctgtgggacttaggctcacctagctcagggcagcacaagtgagaattaaacggaatcccattagtgttaagcgagtgagattggtgacgtcagtggtttccattagcctgaatgagacagggaaaggggatctcatggaaaggagccctcgagaacccctaaggccttggagagctgccaatgctgattgcttagtgtgggccaaattaaaaacagaggcatggaagcggcagcccagcctggcaagggccacagccacaggaaccatagtgcccacaggcctcacccagggtgtctgggaccctcacagaagggcttcgagaagcagcctcagcttccccatctgtaatatgagaggctgaacgagagggtcttaaagcccctccagcatcagaagttctgggagcttccccggaacggtaaggatattaaatgtctttggcagtaggtcttccagtgtgacttggagctgggctcactaagaagcaaaggccctgggagtcacaaccagggactcaacccacgttgtaggtgacaccaacccggtgcaacagcatgacctctgtcctgctgaagagaaccctgggggcccagagccccagggctgagcacagggtgctggaggccgacgggcctgggctttgaccctggaccccctcccccttttccagctgggtgcccctttcctccacagatgaaggtactgacttctccgtgctcagctccccaccagtgcccatggaggagaaggcatggacactcacgagaggaagattcctctccacctgagaaatagcagctcctggggccggggagcccacattccacctctctttcacacctttgtttctagagtccctcctgctggccagacagaaggacgcggtcctcaggaaccatgtcccatttgctagcacagcctctggccaaagttggtccttccccaaggggcctgggagaaaggccgggtttggaggccagccggtggaaccaggagaccagggtggtggagaccagcaagcactctcgttgcagggaacaacagccgcttgcaggccgagctctgccagaagcattggcaggacctgcctcccagtaagtgccacagcaccacccagaacccccagaaggagaccagcagcatgtggggcctgatggtggttgcccagctgctggctggcatcgggacagtgcctattcagccatttgggatctcctatgtggatgacttctcagagcccagcaactcgcccctgtacatctgtgagtcaccggcttgaagagggctttggggaggggtgaggtcctgatgtagcacttgatgaggccctggggcactaaactgaggtcccaccctctttgcttacaacccagcaaatgagttcagaggcctggggatccgacagacttggtttgaatgtcagctccattacctcccagctgtgtgatctgaggcaaatggctgaaccccagggccccaggtttctcacctccaggaggaggctgatattatctgtgcgctggatggctgtgggatacatgagatggcatatgtaaccacttagctggtgttgggcactggatggaccctaaaccaacagcacctactgttgctctctgactagtccttcaggcacaggccaggacacacatatcttctctgagacatccacttaggagcaggttggcctcaaagaagcccatgcaaagcagatagcagatgaccacgtgaatgcccaaatccttcccttcgaacaagccactttgggacgggcgtggtggctcatgcctgtaatcccagcactttgggaggccaaggcaggcggatcacctgaggccgggagttcgagaccagcctgatcaacatggagaaaccccgtctctattaaaaataaaaaattagctgggcatggtggcgcatacctgtggtcccagctacttgggatgctgaggcaggagaatcactcgaacccaggaggcagaggttgcagtgagccaagattgcaccattgctctccagcatgggcaacaagagtgaaactccatctaaaaaaaaaaaaaaaaaaaaaaaaaaagaacacaccactttgagcatcctcagggcctatactccagaccacacagaccacccccacaggctctgtggcaccatgagctcctccgagggcccccagcatcgtacccacagggagcatcacctggcatttttaaatgccttggagcctgtttccttcctggcaagcaggtctctttggaagttggctggaggaagaaatagccttggttctatatgtcttggaatcttgagtggttctggccttgctggtgggagatgccacaggtgtgggcttatcaggcttgggaacagatgaagtgatatctcaagactccccctcagcttgggagcccaaggctgccaaactctctccatttatctcagtctccttccccttacttccttttccagccatcttatttgccatctctgtatttggaccggctttcgggtacctgctgggctctgtcatgctgcagatctttgtggactatggcagggtcaacacaggtgagtatgtgcagaggacacccattcccatccccagctcaataaagcagcccccagccccctcatccaatcagaacagagaatgaagcttcagctccagatgcgctctgccacctcctcactcgctcactcatccctgcagtccctcggagagccaggagcagacagtgtgtgcctcctctctcagggcccacgctggccactgtgaggaacaagctgctgaagcaaactcactttctgcccttaagaagtttggagacccagggcaggacctcaggtgttgccaccacagcgcccatcttggtggcattaaaaatatttctatgggctgggtgcggtggctcaagcctgtaatcccagcactttgggaggctgaggcgggtggatcacgaggtcaggagatcaagaccaccctggctaacacggtgaaaccccgtctctactaaaaatacaaaaaaattagccgggcgtggtggcagatgcctgtagtcccagctacttaggaggctgaggcagaagaatggcgtgaacctgggaggcagagcttgcagtgagccgagatcatgccactgcactccagcctgggcgacagagtgagactctgtctgaaagaaaaaaaaaaaattctatggttctttgattctaagatgttgctggttctttaagatttaataagagctcttttgaggaaaaaaaagaaacatcatataaaatatacacacggatgatgactcacatccagagggtataacatggtgtttgactgtgtgggcgctgggacgggactgcctgggtctcatcctggctccatctcttactagccaagtgatcttaggcaagtaactttgtctttctgtgcctcagcttcctcatctgtaaaatggagctaatgatagtaaaataaagttgttttaaagatcagaacaagcctaatgtatattaagaagtcaacagtatgagttcgtattcttcaacaagtggtatggatgagaatatatagtccctagacaccagcataagttctgagttaaccattcagggagccagccccaggatgaatggagcaagggcttcctgcctttgagagtgtgtcccacactacccagtctcccacaagatggggaaggtcagcaccacaacagagggacaggcaaagtgctgtagggtggagaatgtggggagtgtgtgggtgggatacgaagttccagctcggctgaaggggtggctgaaaggcaggactgagccagactccaggaagagcactcccaccactgccctgcaaacaagtcacgtcacagatatctggcaggtgctagttgcaaccatgctgctagagcctagactcccgtccctaagactgtcagaccacagtgccatctgcatggtgtcatttggctgtacttccaatgaaagtagaaagccagggggtgtcttatgcctcaggatcaagccatccctgtccttttgctggcactccccgaattggttcctggctcttggttgcccaaagagaccagcaactgagtgcccagtccactcagggcagtgcccagggaagcttgtcatgatttgactgaaccgttctgccaccttctccttccctttatgcccggatagtttctttacacagagaaacacaatggcagacttttacacgtgtgcaagagaattgccaagagaaagctgctcctttggaagccaggcagttcacacagttgatggttgtttctttaggcttctaaggattatggggcctcctttgttagggatccataaagttgggaggcagtagtttaatggttaagagggcaggtttgcataccagggagacacaggcttgaaattgaccaatgaaatggcacttactagcctttacctgaggcaagggacttaaccccttctatcctcagtttcttgactggtgagaggtgggcagacttgctagagaacccagtggaaaacagatggaaagcacgtggtctagagtctggcccatggtgtgcccttgtgagtgagagtcagctcccttcttcactacttctgccaagggctgggagttgaataaggaggtgaaggtactgctccctcctgcccggggattttctgatgctgtgcttcatgtgcagtggccttggtcctctgggaagaccaatagctgggagagggaatgttgttttgaccaagaatctagctcatggcttgcctcttctgcatcctgggaagaaaatcagtgaaactccccctgatcagaggttctgtttccagtaaggtgagatcatgcattcaacaaacatttgcactcttcgttttctcttcagctgcagttaacttggtcccgggtgacccccgatggattggagcctggtggctaggcctgctcatttcttcagctttattggttctcacctctttccccttttttttcttccctcgagcaatgcccataggagcaaaggtaaggttccaagagcccatgactctacctgatggagttgaagaaagggatgtgggggtagaaaataaatagagctaaaaagctgcagcatgttaagcaaattcagggtgaaatctaaacaaatttcatgatgcaggacttcccagaggctttaagaggtgagggtgttggtgaatttccaaaaggtggtatctcctatgtgttcccgtaccatgttagcatgtcaaggatcaggagacctccagggaacagtttgggaaacactgagcttatctaaattgagctaaagaattaagagccaataaaggccaagtctgcgacctggtacagtcaacttttacatttaatagggcctatcagtgttcagtgtttgaacctgaaaaactgagtaggaagggattcctagcattgaacagtgttgagggtggctgaaattggagcatattttgagcagaggaccttccaagcatcttccagtcacgcctgctggggaaaggaatcagggaaggatgagaacggagagcaaggaagagaagtctgggtaggggcttgatgttcagctgaagggtctaaagattgttctaattccatgaagttctagagcactgcagtgactgggtggccacttgggtggcaatatggcagctaggttgagtttagggggtagggaaggaatggaggctggagatctgaagaggccagtgcagagaccaggtgagagatggggaatgcagcaatggttgtcggagagctgggacagggcaaagataaggatagacattcctagggtggatgcccagaaggactcagcagtgagctggcttggaggagaagaaggagctaaagtttatgcctaggcttcaagtcccaaaatagagctcaatgtttgacaatgaggtatataaaatctaggcccagccggggggagaggggcaggggtgggaggacctcagcttgtcttggggaagaatttcagacgttggctacacatcatgcaggtgctggggtcaggcagacctgggtttgaatgaagctctgctacttataaaccagctgagttggccaggtgtataatctcacactttaggaggccaaggcaggaggattgcttgagcccaggttgagattggtgggtagggaaggaatgaagttcaagaccaccctgggcaacatagcgagaccccatctctaaaaaaaaaattattttaaaaacttagctcagcatggtgttgagtgcatgtagtcccacctacttgggaggctgaggtgggagaatcacttgagcccaggagttcgaggctgcagtgagctatgactgcaccactgcacaccagcttgggtgacagagtgagaccctgtctctaaaaaaataaaaataaaaaataaaaaacaatgaactagctgagtgagcttcgccaagtttctttgttcctaagcttcctcttctttacagtgctccagctaattagagtagcagtatgggaaagcgttgtgaggaatgagacaaagcatatgaatactgggcacaggtccagcagggagtaagcactcagtgaatgggagagcctattcctggagatgagttcccagcaggatcctaatgctgtcagagcccaggggccttgcatctgaaaggtagttcagagctgcagggccttaggctggagctgacaaggtcagaagaggtaggaaggttccctggggtagtatacccaagaaagtgcaggtaaaggtttaggacagagccttgagcagcactcacctttaggctcaggaggaagcaagaatcccagagaggagatagaaagggggaggacggtggggctggaaacagatggcattctagaccagagtgtcccagaagccagtatcccctggaatctgagggtaggggagaagcgtagccatgacagatgggggtgaggggtggggtccaggaagacacctttggcaacagtcataggaaagttagatatgaaatgatatgcccacaggtatcgtgggaggcattggcatagatgtgttctgattgtcggccaaaacaccaggctcacggaaatgcaggtgctgtttgcttcaggagagcattctctggatgccctcccatgcacacacgcctggagggggctcacctccacccagccctgagcttctgaggccagagactcaagggctcagggaagggtggctacagtgagcctgggccgtgaacactcaccccttttattgccttcagagggctcctgccacagcagatgaagcaaggaagttggaggaggccaagtcaagaggctccctggtggatttcattaaacgtaactgaccctacagccctgggtgggctggcacagtgcgggggaggggatagtggccagggggaccccagcccctgtggtgttgtgtgcggtaagggacagtaggagcagagggcctgtaactggcccatcccctaggtgtgcctgcagcccaggggttctgccagagccttgacagcggtctgttcacagggtttccatgcatctttctgaggctcctgatgaactcactcttcgtcctggtggtcctggcccagtgcaccttctcctccgtcattgctggcctctccaccttcctcaacaagttcctggagaagcagtatggcacctcagcagcctatgccaacttcctcattggtgagcccagagggtgctgcaggatccgcagggcttgcctgggccaggaggcaggcactccagccacccatccagggatgggcgcaggccagaccggacataggcagggtccggaggaggactgcccaggagaaagaattttaaggacagttttcctggttggcaatctagaaagttcttggcagatttctgactcctgtccttccagtcaggagtgggtggaggctgggggctgccttcctccctgtaaaggggctggaagtctgacagcttcccaaaggccctgacatcatcaggaacaacacaggaaagagggaaggttgaatttgaggttagacaaaatgcctccgggattttctcttcttccctagggacctgagtatatttgctttggttagacaatatatggtccagagattctcaacccaggctgcaccagaggctcctctggagagctttacaaaacacagatgcccagccctatcccaggttaacgaaaccagaatctctggaggtggcacccagcagtagtattttttcaactgtgttgagaactacagatgtggtcccaccaagtaccctaggaaatcactgggcccaacccaacccacaggtgagtttaaccatatggagttggcaaggtgatcagtgcatgagattggagggtgactcccgtgcaccccctggctggtccttggctgtggctttacccctctggccttccatctctgactggtacataggggtcatcactcttgtgttgctaaccccatgcggtcccatgcaaagaggccccaaggaatgaaatgtgcttaataaatgcatattcaacccacatctcttaagctgcaagaaccccacttctgtattttttgtgtaggcaaggcaatcctgtctcaagatatttctctagatgtgcctggcaagcagtaaatgctcaattaatgtcagctacttcgattacaatttaacataccaaatgttccttcctgaagccatgcttccttctcagtgatccagctcagtgtttgtagcccacatgcagtcccaggcctgtgcacctggatcacctccttctttccacttataggtgctgtgaacctccctgctgcagccttggggatgctgtttggaggaatcctcatgaagcgctttgttttctctctacaagccattccccgcatagctaccaccatcatcaccatctccatgatcctttgtgttcctttgttcttcatgggatgctccaccccaactgtggccgaagtctacccccctaggtaatgggaataaggggtagagagatcccctttaataaggccagggcttagatctggctgttatacatcttccttcctgcttccttaactctattctttgctgtacacttttttttttttttgagacagagtctcgctccgtcacccaggctgtagtgcagtggcgtgatcttggctcactgcaaactccacctcccaggttcaagtgattctcccaggttcaagcaattctcatgcctcagcctctcgagtagctgggattacaggtgtgtaccaccacacccggctaatttttgtatttttagttgaggcggggtttcaccattttggccaggctggtcataaactcctgacctcaagtgatctgcctgccacagcctcccaaaatgctgaaattacaggtgtgagccaccccgcccggcccacttttgatctgatctctcacgtggcaacttagaaaatcaggtcttgaatggtctgctccattataagaagagatcaaaggctcttactgggccaccagcaatcagggttagagttctgttttcttaagaagcaccaaaaactaatttgtttgatttcaggatgaatttgtagggctgtgagccacaggaaccaggaaataagctatgtttagcatcagctctgtgctggctagaatttcagtttcattgagctgctgaagagagatgaaaggagacttgaaaagatctggagaagaataatgagagtgatggcagacttgaaaaattagggcaggtgaggagaaggtcaggtaaagtctgcctgttggtttgcagacagcaatatgggtcacagtgttaactttggctttatgttcaggaagagcttcagagccctgtgaggggaaggatgccaaccaaggggcattttattttatttttcctgggtgccacctgtcaacaagcttttttttaagactttgcctaatgaagttgcaacatttggagatgctgtacctttcagccctggtattttctctgtttttttttttttttctttgaaatgacctcctctgtctttggtgggtgaaggagagaaggggtttgggggaagggagggttgctcggggtagggagctcacccctagtctgtacggcacttctgcaggctgactgtggattgaggaaagccgagaagcctttgggccttttggcagcgtccactgggagtttagcacatggctttgtcctcagacaggcctggactgtataccagtgttccttactagttgggggaagttgcttaccttatctaagctttggttttctaatccacaacaggcaaataattcactgtagactcgttgtgatgattgtgcatgtaaagcccccgggcacagtgcctggcacgagatgaactctcattcgtataattatactagtgaaatatctggacagtggtttgtcagcccctttcccaaccctccccgaagaaggtcatgaatatcagataccggggaacagtgggaacagtgagatcaaccagtgaaatccctctggttgaagctcaaggggatggagtaactctgggcaaggtctacattaagccaggagacagacagcaaactaaatcctggattgcctcagcggtcccagccactgtttttcggctgaagaagagggaaggcgaatattgtctgtgacctgcccattgcagctgccctttctgggtggttggttgtcttgacgcctactgtggcaagggattcaccagccaggccttcccagagcataattagtggatttgggctcccagtggcagaagaaatggagagatgccgtgaccactaaacagtggcaaattcactgttggctccaccaggcataattcagatcccagggtggcactggcccaaaagaaataaagatgcacagacacactcaccaggccaggaactcacactgggctggagtgtagggtttttctttggtcttgctttgtttgattccccgtttcctcttttgctggcagcacatcaagttctatacatccgcagtctcctgcctgccgcagggactgctcgtgcccagattctatcttccacccggtctgtggagacaatggaatcgagtacctctccccttgccatgccggctgcagcaacatcaacatgagctctgcaacctccaagcaactggtaagggcagccagggtccagaggcaagaggagccccacaggatctcggagctcagcgcatgccctcaaagactgtttctcggctccaggataggcagggctccacacacacactcattaccagcatcctggcctcctctgagccacatccaacctctctctacctccctaccctggggtcatgaccagatgctgacagcccacagtcaattaaagactggccgatgtccaacaaattcacattcttgaggcctaactgctcagagcagaaaccagtcaaagcactccttcagctgaggcctttgagccccatcctgagagatcctcatgggcatctctgggtcctgcaggctggccgtggcccagataaatcgagggcattaggcttctgtgacatggacctggaagggtagagccagaagcagtagctgagggcacttggttcaacccctcagctcccaggtgtggccacatggctggcctgaaatcatgcagctatttcgggctgacctggcacttgaacccagggctctgcctcagtctggggcacttctattcaaagccatgtatcttctggccaccagctttccacttgggcaacctccattcactagactcacttggcaaagtacagtccttttttctgtggctccacacctcctaggatcagccagcagcaaactgacttgagtcatttgtttagttattcaataaacagaacactgggcacagccgtgagtgctgaggatgtgatggtgaacccatcagacaaggtccctgttctcatggagggtgcattctatcaaatcaacacacaggataattctagaaagtaacccatgccatggaaggacttaataggatggagagttcccaggggcctccgggagagggtgacattagaagtgaacaaccagaagaacagaattctatgcacaccaggagcaatgcattccagataaagggagcagcaagtacaagtcccaagggcatgaatgtactgggcatgctgtaggaaagaagagaaaaggccgggcttggtgctgtaggaggagtgtcacacccagctggccagggagcaggcaggagccagagccaggcaggccaggcttaggaactgctgagcaatgagaagactgtgcagttagtgtaagctaggaacatgccttattcccttaagcccatatggaggggatgggcaagcctagtgcctacttaccaacctcctctgaaaggacagggcaaggctgctgccactgccacctctgcgggcgaaggagcgtggctcccaggcagaggaaggacaaggaacttggacaagatgctctttaagttgccttccagttgtggtggcttctgtggttttcttatctttgttaacttacctctgagtcacctacttccagaaataatcttggcaagtttcccgtaacagcatacatacctcaagacaaaaacccattagcaaaatatcaagaaaaaaaatcagtaaattataaagaaaaaaaatctctaaaaaatccagactgaggaaagtaacagcaatattttatataactaactttggagtttcctaggggccaagtgaagagggtgcatagttaccactgtcggcagaaggaaacatactagtcccttagttccaatattagtcttgtaactgcttggacactgaaattgtcacaggctgggccatctgacaagggcagcgaaggaaggtgaagaccaccagacaagggcagtggccaccaaagtgagttggacaacagtattgagccatatggacttgcagacttgagacaggggcctccttctctggagtcccttctaggcaggagttcctttcaggcagggaactccagcaaaggcctgacagaatcagaacccagggaattccactgtgttcccactgccctcctactgtttatgcctccctctgcaataaacacacaaacagcaaaaacaacaatctgcaaaaccaccactgctgggcacaagccctcctgggcccctggctccaagctgggggttgggggcctaacctggcagtgttcctgggcatccagaggcagatatgacttctggaggagcccagcccagcccagaagatggtttctgttgcccaaacagtgacagaggtgggacccctggggcagcttgaaaccctcacctggccccaggctcacccagcttccctgggaaccagacccagaggacacaagggttgaaacctcagtctccaacaagagctggtgcagacgtctgaagtgtgtgaaagtgaaataataacaaatttccccctttttccctccccttcctcttgaagatctatttgaactgcagctgtgtgaccgggggatccgcttcagcaaagacaggatcgtgccctgtcccctgtgcccacttcctgctcccggccatcttcctcatctccttcgtgtccctgatagcctgcatctcccacaaccccctctacatgatggttctgcggtgagtggcaaacctctgtgagtctggggcgtggcttctccttccccacatctccctttgactttgcgcctagttgcctgtttctcatctctccccccttttgtggccctcagagtcctttaaatgacaatgtgcaaggttcttttgctgaggggaaataatactaatggcaacagtgctgggagccctgcccagggaggctctgtgctgagctcctcattgcagggcctcattcagtcccacagcgtccatgtgacacaggccctgttggcgcctccactctgcacattggaggttaaatcacaagcctaggctgggcgcggtggctcgtgcctgtgaccccagcactttgggaggccaaggagggcagatcacctgaggtcaggagttcaagaccagcctggccaacatggcaaaactccgtctcttctaaaaatacaaaaattagctgggcgtggtggccagtgcctgtaatcccagcttcttgggaggctgaggcagaagaatcacttgaacccaggaggcggaggttgcagtgagccaagattgtgccactgcactccagcctgggtgacagagtgagactccgtctcaaaaataataataattaaaaaaaaaatcactagcctagtatggcagagccagtgaatggctgagccatgtgttgaagccaggctgcctggctccacaccatggaaatgcctgtaggtttgcttatttttaaatcctaaaagaaatgagaagagcaaagagaatttagttggatgcataaaaccaaggcaggaaaacgtggaaagtttcagagtcagagtgagggctatggaaaaggatgaaaatgagaaaatcctggtatgattggctccaggaccaagttcccaggtcaggaagggagccgctggccagagctggaggggaggagcggggtgtcccgttacagctggcagctggcaatgaatgcttctgaggttttcactgggaatgacccgctcttcacctcactggctgcaaggagaaaacaacatttgtaccaaattcacctaacccacccccactgccctccctcctgtcctcactcacctcgcaagcagagagggcaaaaacacaggatttggactcccggtgccaggattaaagtccctgctctgccacatactggctgtgttagggtgttgcctaacctcattgagcctcagtctccttattcatgaaatgatgatgatgatatcgaactcaaagggttggtgtcaggattatatggtaaattgctttgtaaatataaggtgttctacatattggttaattatcactattaatcaaataataataataataattcacagctagctaggtgtctgtgacctattttccccagaaggctaggagaaaaggaaggagcagatgcagccacttgttgggatctgggattttaccctatttataagtgagctatcaagttagtgtgaaagctatcaaatcaaactactatttcaaggatgctggcagaagatgtgagactcctgggtcaaagacaaaatactttattacagcacagaaagcagcacaaaacttagggtgtgtcagttatccttgacccccaaatcctacaggggtgacacagagaggcccaggtgtacactttgcaagaacactgagcatagaagagccaccacttctatggtgagcagtgagcaccgctgctcctggtcttggaggaaacgttaactcatgcctcagagttgctcattgcaactacaacccggagaaacggcacaggaaaacagtagtcaggaccttgcattctgagcttactcagcaagaaggtgcagggatgcttggaacccacggcgtgttgcctcctttgacaccactgtcacccccttctctaccgctccccatcctgcgcattcaaagcactgacagcttcacctgagactcttcagcgggcttcccttcttgcaccttgggtcagatggaccacagtggaccctccagccctgacataaaactacatgaggccatgatgaggagagggcacagagtaggaaaatctccctggcaagtcgctatgcagcaggaagaagggcaatccctgtcaaatcacctcccagaggactcctgtcaaaccctaggtacaaggaggtcgtgaagaacagagcatcatttcaaccacaggatgggcttctctagaaaatctctcctttctaggtcgagttggggtagggggtggagaggaggccccaggatcccacaacgatttaaagataaatcctactgggaaagatgacagaattgatgctatttagtgtgaagaaggagaggcttaaagatgactttgtaggccgggtgtggtggctcacacctgtaatcccagcactttgggaggccaaggtgggtggaccacctgaggtcaggcgttcaagaccagcctggccaacatggcgaaaccttgtctctactaaaattacaaaagttagccgggcatggtgatgggcgcctgtagtcccagctacttgggaggctgaggcaggagaattggttgaacctgggaagtggaggttgcagtgagccaagactgagccactgcactccagcctgggtgacagaatgagactctgtctccgaaaaaaaaaaaaaaaaaaaaagatgactttgtaggtgacccaagcattatttatatgagtcctggcccccaattagccatgggaacacaagctggaagtgaaggctagctgaaaacgtggaaggagaaagagaggtcagaaggtcagctttcattcagggccacatgggacagagactagaaggggcccaagatctcaatcaaaagccaaattggggtggccaagtcccgtttcattgagaatctaggggagtctgcccagggcaagggccaagacaaggcaggtatctattatgaactggaccactggagggatctgtagacacaacaggatttgagacactttgcattgtgggggtcccaaggggtgcctcttcccctgccccaatgagtatttgtctcactgggccatccctcagggggactgggcaaaggtccctttccagtttgctagcagaactgtgatggtggtggtgaaacaaaccacaggtagaggcctggggattacttctgagctcccttcctcactgtcccctagcactgaaggctcttcctgacaagcacccaccgggagtgtgtgtgctcagagcacagagagtcctggagtcaagtcactcatcaggtgcctctgctggccagctgctggctccccaccttgtgtggaggtgtcctccctctctccactccccagctgggatggcagggccgtcccctgctctctctgaatctccttcctcagccaaacacattttcctctcttgaaggaagatggttaggggcaggaccagctacctaatttgcaggacctattgcaaatgaaaatgtaaagcccctggctcagaaattaagaatttccagacagctgcagcagagcattaagccaaacatgggacctttctgagggtggagttgtatgcacacacccacagagctagcctggggtagggaattcttttagctgtgcacagaagcctgcagcccaagggccctaattacactttgcagcagggctgtcttttactgttataagacattctgtgggagttgttcagacctgctgctatcaacacacccacagcatccttctctccactcctagcctctactgccctctgcttcttgaagggggctctgggcagccctgaaaatcacacagactggtggttctcagtgatgcatcagaatctcctggaggtaaaatacagattgctgggccccatccccagactttccgactcagtaagtctggggtgggcctgaaaatctgcatatctaacaagttcccaggggatgctgatgatccagggaccacgctttgaggccactgatgtaaagaactagagcattcagcccaggtgaacccggtcaccagagggctcgtcaggccacatcagggctggttctgacctgctctgaggctggctgccccttacccaagggatcgtgcagccctgaatcctcccactgctgatttcctgtctgtcttttcagtgtggtgaaccaggaggaaaagtcatttgccatcggggtgcagttcttgttgatgcgcttgctgggtaagtgtctaagacccctcttcccaagaagtggccccaggcgatggggcatctgaaggctatgggtgcagggtagcgatggaggaagcaccatctcatctccatggcgaagagaagctgtgcataatcaacagcagatgccaaaatccatgtggacggtttcccagattgcttgaggttaggaaagactccatctatggcattcattcctaactaagttatgtaagaaaaatgaaaagtgaacacagctgagaatacctaatagagtgttaaaggcaggtatttttaaatccttctcacaaaactcactgtaggaacaaaactttgcattcctgccaagccagagcagcggctgagcccagccctggcttcctttccattttacaaaattcactcctcctaaaactatttagcaaaagtttcttccctgtggggtcctctgctggtgagtcctgcctgccctcaagcagtccagagcccaccagaggaatggagctgtgcacaagtgatcagcagtgccccaggggagagcgagctgcttgaggcagcaggagtgctctcccggggtgcctgggctgagggctgggggcacaatgcaggcccattcctgaactgctcacactggctgttccttcttgacatatctgtgcactagacttaacacaaggcagcaatagagagatccttgtaatgacaggcacacagtagtaaagggacctaattgaactgaggatgtgttaattaagggtgcaaactacagaggggaatatggagactccagcaagaggaacttcagttactataaggtgtcgtttctgactataaatcctgaaataatgtatagcccactgtgcctcattacccaggggccaggtcaacaccgcgccctgcagtggcttccatccccattttgagatgtattggtgatgtctctactggggccaggtgagcgggagcccttgctgagcccaatccagtcccaggctgggagaagtgtttggatgatgggaatgaaccagctttttcagtgggatttcttgttcctctagtccctgcagagccccttcagaccctgctcctgctgcctgcattataaacacagaggaagcagggcggcaggatctacctgtcctcccagcagaggctctgctgtcatcagagctccttattttcatttataacttaactttctctaacacttctgctgggaaagagacctcacattcctctcagcccatccagcacctaggataggctctaaagagccctttcctgcttcctccagcaaccttgaaaatgaccttgaaaacaaggactctctcggactctctcgcactgcttgaagcactcgctgcttttgcttttccatttgagctcagataactcaatgtgggaccacaatgagaaaacccaggcctggaggggttccatttatcacccaagaacacaatccactcttgggtaaaaaaaaggacttcctattacaggttttaaattacacattgggattgggttgacaatgtttccggactttgcttctacataaggaagtgtcatatatcactctggccagttttcatccccctgttcacctggagacttgagagtgagcaggatctgagtagagaggcttcttcttagagtttcccacttgtgggcagtgccacaagtggagcattgtctgtctttcttctggaagcagctgctcacagggccctaaacaaagtctgggaggctgttgtcagcactgtggtgctgagaatgggatgggccagccttggtgtaaatcctggacaagccctccgcagtccagtaactgcctagagctgtagctagtggtacgctacccacaggtagtgtggcatccggaatattagacagccaggaaggcatagcccctgccaagccaaatcttaacactcagctgctgggaagttcggggtcccagagcagaagctttgagcagccaggtattgggaggtctgcagaggggtgttgtctaatccaatagggcagcttggtgtggtggaagtacatgggattcgaacctccataaaccagggttccaagtctggccttgacttctcttggctgtgttacagtgtcccagccaagaaccccttcctcttcactaaaaagtgggcacccacacctcggggccagtgtgaggacctgagaagtcgatgcctggagagcctcctgccacacagtggaggcccgtgtatctccactctgagctgatctcaggagaactatgttggatgtctgagccggcatcaaggtgatccctgtgacttactctgacttgaaagaatggcccaggtcccttttgtcttctaagccttctggtgaaagagaaattcaggcttcactgaaagctattctgctttccagagtcactgtgagtcctatgggtacggcagagccgttctcatgtatgtgaactgtgtcggggacttggctcccacacccctgctggacacctctgcctgcagttccacctgaccagggctttctgaaccctcttccagcctggctgccatctccagccctctatggcctcaccattgaccactcctgcatccggtggaactcgctgtgcttggggaggcgaggggcctgcgcctactatgacaacgatgctctccgagacaggtgagggcccatcatgtatgtgtgtcccagagccaggccctgggcttgagatgacagtagtcatatgcccagtggctactgtgggggctgtcaggcttccaaggaagagaacatgaagggccacctctgcggccctgccatggacagggagcaggggctactataacaggcatttcagggctcacagggagatgtccagggacttccatgacccgaaagcccttggaaggggcagcagacccagggacttccctgacccgaaagcctttggaaggggcagcagcagaaagaaggggcggggatggctggagcccaaggaagaggccatggctgtggaaaaattgggggcagcctcctgctgctcagagacagaggggggccacatcatggctcctggcagaggtccagggcagggggaccaacctgcctcaatgggccaagtccagctgcagtgctattgggttctgcaccccttccagccacctcacctgctgccgttgtcatatggcccagaaaccacaggaaggtgggcttgaggggactgggcaggggctggaaatggtatgggagtggcagagaagaccacaaaagggacaggccaagagggcagtgagaagatgcctctctccttctggctctgcttggaggtcaggaccgtctgggggtggctggggcagctgggtcacctctggccctctggaaagagccagtggagggatgatgagccctggattaagagtcccatgcctactccctgcctgcttccctacagctttgttcccttttgggtcaaagaaatgaggaaagtgatcctcacctggatggtgcccacaccttccgcgggccagcgtgggaatgatgtggttcttcccagtggtcctggccctgggatgtgggctgcagagccccctccctcaccagtcctgcctcctcctgcccacaggtacctgggcctgcagatgggctacaaggcgctgggcatgctgctgctttgcttcatcagctggagggtgaagaagaacaaggagtacaacgtgcagaaggcggcaggcctcatctgaccccaccctgggccactgccctgctccagagagtggaccttgactcttccacacctgcctatactcactaatgttaacacgtcatttcctttttgtatttttaaacaagaaagaaaaccccagtcctcatttgccttccctacctcttcctcccagagtcctccccacagttcctaagggccactgtgtacccgggctgtgtgggccagaactggggggctgagtcttccctggccccttggaagaggcccccagatgcccaggctcacttcagtgttgagtcctccattgaggatgcccactgaggcagccaggcccctcaccagccctggggggaatcctaaacagagagagaaaaagggtatctgcccttcttgccaggcagctccactctcccgctgactgcccacaccctgcagagtggcaggggtgaaaggaagaaggaagtggctgagttattaatagccagagccactgggagactggggagactggctgtaacccccttcacacctgggtttggcatcagcacagactacgggaggggctggctccctccccctcagaccctcacttcctgtacctagaggccattctggatgctgccatgttgggaagtacagtctctgcccattacctgcatgcaggcaccagagcagggactgagaaaccccaaggatgggtcatctaagtgctgtccatatgaaccctggactttctgtccttagatcctcacatgttatccctgtctttctggggtacgtttcaaactgaggaagctacaacacagtgaagacccaaggaaggcctatgaaaaggtcctgatgcccaacctcccaccccttcaatgtggggacgagaccccctcatctcagagtaatgggaagaacctcccacatctccctggcagcagatgaggtggcttcacatgcacttccctgtctggacttcagcccgtattccgaggagtagagaggcagaagagatgtcagcaaagcaagtgatgaagcagagtggatgtccactgtcaccaagctggatggcaagctgcggcccacaaaacagccagtcaggttggctttcctggtttcagacatgctcataccattcccattttctcagcctcttctcactgcctccagagaggtgggtgcctgggttgagagacacagctgctacgtgatagatgttgagagacagaagccaacgaaggaggtcattcatcaacaaatatatttattggagaccgactttgtgcaaagcaatgctaatcagggttctccatggagcttccctcagctcttacctcacctccctccatttacattagggccttctcccagggtgtgctcggtgggcagtgtgggactgggggtgtgggagttggtgagagcaggaggagaggtggggacagcaagaagccacagattggcatgaaggatcctgacctgactatccatgccatccatggcccccagactgactctgcacctggccctttgccagacagctctgtctccccatgtcctctggaacagctgggcatgggtcatggccattcatgacccttaagtgccacccttcttggaagaccccctccagaagcatactggaagccacctctggaaaagcctcatatggtgatatgccaaaatatttatgtcaatgtccaaacaaagtccaatgccatgagactgaagtctttgtggaaaccactgttacagacaagcttatttccaaagccacctcatttccaaacatctcactcaggaagggaggctcaatgtaacctcaggggccagttttagcatttgaaatggttctgcttggaaaatgatgccctgcaactaaccctggtctttcccatggcaatttaaccacatttggaaggcactgccttcagctgagtttatgaacaatgaatgccaaccttcaggttctagaagattggttgcactcccaaacctttattctattatattactattaaaatattctaattttgctattgaggtaacttggtcatgaatttatgttgtcatatacatctgtcagagaacagacagcacctgcactttttaattttattttatttttatttgtattttatttttgagatggagtcttgctctgtcacccaggctggagtgcagtggcacaatcttggctcactgcaacctctgcctccttggttcaagcgattctcctgcctcagcctccagagtaactgggattacaggcctgcgccaccacacctggctaatttttgtacttttagtagagacagggtttcaccatgttggccaggctggtctcaaactcctgacctcaagtgatcctcccgcctcagcctcccaaagtgttgggattacaggcatgagccactgcgccctgccggcacctgcatcttgtaaacagaggaagtgctcatgacatagaccccaggggcccatggccatggagattagaggtaatgcaactgtcaacccattagcctggtatcaggcaagtaccagacactgcttattccttcagtgaagttctgctgggctctgagaaggccgcatcactgctcttgggtttatatccagaagcggagctggacgcaaacagctatgtccatggcacaaaacagaattaatatcataatcaaattgatcacatggtcacaaccagtactactactcccaagaaaatctttcttttcagctgtcagcagggaatataatagtgtcactttcatttcacttctagagcaaagcttaacaaactttcttgagtgtgtgacactcacagaggatgcaaattcccaacaccctccacccagccccagcgtctacttctgtgggtctaatggggacccaggaatggctcttttaacggccccctcatgagattgatgtgggtagttcccaaatcctgtgaggtgggctgtcagtgcaatagagcctggggtatgcccatttgtgcttaggccactgagaaatttacaggctcgataggcctttggtatgttcaaaggtgagtgaaggataacaaggtgaagagatgcctgtgaatctgattttttggatggctgcaactaagagtcaatgggcatgaaaaacaatccaagagctcacatttatatgaggcccttatcagtactgagagagacattctcacttcacaagcttggatgtgcaaaaagaaaaaaatcacttatttctttaaatcagttattgatttcaaaccccccatcctactgtctggctggaaattcaatatcaaccatgcttgggtctggctcctagagccatctgaaggtccttggatgcctacgcattcaagggtgccattgtgggtctttggtccctttcccatttgaggctgtttaatggccctgcttctcacctgagcctggaaaccctacaaagccgagaccccagggttaggcccacctccctgtgcacactcgcggctatgccctctcccggccccagtcctaggaagcccactcctctgcaccactccctctccctacagaatcccgctcctcaagggctgaacaaaaaagccggaaaaggaagagtgtgcaggaaccttttttattcaatccttcttttacccttcttggaaaaagcgcaaatacagtgataactaaataccgtatctctatcaattatcctttggcccaaagccctttggggtgatcctccatgatggatgccccatgtaaaggtgaggaatctgatcccgaggaagcaaccattgtggccaatttcacatagataatagctggccaggtctagactcaaaccaggctgtccacttctctctggtccagcccaattgccccagctgagtcattctgaagagtcagcatggactaaaatggtggggaggcccctcttttcccactgatgttcactggcccatgggagggaagtgggggaatctcttgagggccattaaggtgggtaacaaaggcaaaagaaccaggtaacagttcatttacttaccttctattcaactagcaacaacatcacaactattcattaaacagggccaatttatccctatagcaccatgagttaaagagagttgtggagaaaagagacaaagagggaagggttttgagaagaaaaggccctgagaatcctgcacacagaccttcaagggaacagctccatctggtgactgcttagcagattcttgctcaagaaacaaagccatattgtgattttattcaaccactctcaaagatggagagatacagttaagctggaggctgaagccagtcagtatcaaattgatactaaaatattatattgcagcaaatccagaagaaatacatcctatctttcgcaaccacaggaagtaaatacctggaagaaaggtccatctcctgccagtagcaccagacaccagattcattataacctttcatcagagattaaatatggaaacagatcctggaaaagcccttggcaaatcataaatgagaggaagtttttctccatggcataccctggccattcctccactctccagccacatcatgtctccagccctgctacaacttgacagcaataataataactaaaatgtgcacagatctttacagtttaccaagccattaacccatttaaaacacttctttaatcagtaaatcagtggggaaaggcttggctatgctgtggtaacaaacctctcgaatcttagtcacttgacacaacaaaagatggtatctcgctcacagaacctgtggtgatctgggtgactctcaggtcagtggctcagtagtgcccctctgcctgctcagggcctggaggattggcctgagagcccccccaaccagtgtctcagtaactcagactgtttggaacctgaggtacctccatttcattataagctgccatgatggatggggcaggggaagaaagtcctggaagatcccgcactgctaagcaatgctttgtcccaaagtaacgctcttcactctgctcccagcctagctgccgcaagagcggaacagaatattctgtgtgctcaggagaagaaaagagcagatatggttgagcactaaaaccctctactgtgggtagtgaacctaggtggacacagttgctcaccgggacacttaaaccagctttgcggggctgtcggggttgggaagcacagtctggaaagatttcccaatggaggaagcaccaattgtgggtccctgaagctgaggggatgatgcccaggcaaggccgaggcagtctgcagagggctggggaggtgggaaagacgattttgctcagaggaggcagagatggggtggtggctgagagagatgcagggtcaaggaaaggatggcttcagagaggagagatttgctggggcaaaaggccacaggatggggaggctgcggggtccaagaggacagctgatggagcgagaccctgcaggcaaggaggagatggggtgactcatggcagaatcgcaccagagttcccacagccctgtgcggccactatgactagtcccatcctgtacatggagaaaacgaggctccttccagttgtccctcacgcctcccttgatttatgtactacctgatgtgtataaggacaggtggtgacaaacacatggtccctacccttcaaggacatataatccagagctaagacaagaccttaacacagggcaaagtactatgctctgagttcatttgatgagcgatgggagaacgggcttgatcctagccatgcgggagagactggaattcaagagagtcaaatgtgctgggaaagactttctgggcaaaaggaataagcaaaggtgtgcaaaggtaaggaagcaggaaacctttgcacatcttgagaactcgccggccagaggcctgtgaaggagcgcagtggtcaggcaggagaggcagtcggatgcaggctgagaccatcctggagggtcttgaggctggcttaccccaggctgtgagtagtgggctcagcctagtcccggctcctgggttagtgctcacgtgtctctctgccccctcagggcctggaggaatggccttagagcccccaccaaccacgctcaggaaggcattcctagctcagagtaccctcctggagtctacactggaaggggctcctgagtgggccgcgccacaccccgaggagcagaggcgcagtcctcccgcgtgctcccagcacactccacccctacccagcacacccacggggcccccaccttgctcacctggggggaaccacccactctgcgccctctcagggagaggtggtggccgctgctctatcccctccctctcttcctcttccaccttctctctcttctcatctgggtgctggaacccaagggtgaaactgagagtcagaaagtctcagtctcaaggcagagcggggcaactaatttaaaacggcttctactccggcccccagtgtgactaatctccttctcttcgctccacaggtctataaatgggccacagtaggcacccctttttaaatctgtaaaatccccaaatccattaaaagtgacttcagaggtcccagatagggaccaacatttgtttaaaccttttcctcattacatctcatgaccgccagcttacaaaagagagactgggggttctggatgagacgtatgcaatccctgagtccaccttggaaaggacagaggcaggtgtcacaccgttcctctttgacccgaatcgcttgaatcccagagtttcaacagctcaggtgggttgaaggctcagaatgtaccagacatccgaagcgctttacatacatttgctccttgaatcttcacgacagccctgtgagatgcaataatcatgccattccacagacgaggaaacgggcccaggggactgcggtctcggctcctttcctctggctttctcagaaaaggcgcggaggcccccgccgggtgggcgaggcggggtgggcggccccttgcgccctggagtcgcattccgccaccagggggcgccgcccctccgccgcggcccggggaagccacccgcggaggcgccacgcccagcccgcccacgggacgcccccgcggccccacagccagccgggcgggactccaccacccggctcagcgcgcctccgatagcccgcttccccgccggggcgccctcgggcctgcggggctccccgcgcccaccgcacgcacgcacgcacgccttcccctactcggagggcccggcggctgagcccaccggcgcctgctcacgggacacagcctcgagaaaacttcctctctgactgcccgcgataaagcaccgtttagtctatttatgttttctgcacgaaagtgtattaaacacgttagagaacaagaggagtagagagtaaggtgccacgaggcaccgagagggcccgcgggaacacacggcttcctcaggctctctgaccggccgtgagcagggtggtccccggccgcattgtggggccattcgcacccagaagctgtcagcctccccactgcgtcactggcaccatctgggaaccattattcagccactgcagggggctaggtagcctctgcttcctccttccaattcccaaaaccttcaccacagcacctcctggggcctggccccgagataggcttgcatgtcggaaagaaactgttgtcagcattccaggcactgtccaccccgggaaaggggcaggtacccatcccgtcacagactcaggtacccgggcaagccgggcaccaggcctatagaggtgaacaagacaaacagaaggcagacagacaaccaagaaagcatccaaactgtggctgcaattggctgatcaattacaggtgcaatagtgccatgaaggagaagtgcaaacagacagacagatgcctgcatggaaatgcagggggaagccggtgtatgtggtggattaacaaaggtgaaagaggcccgttccctagggattggagatctggagcagagatgagctctaactgtgcctggaaggatagggtaagtttgttgacaggggccttagagaaggtgttctgggcggaggggactgcaggagtgaagactcagagatgagaaaactggaccatgtttgcctggagggcagggtgtaagtagcgcccccagttgcaaggtgcctcaggcagagcgtggtgagtggtggattctagagggagagagtgtatcatgtacatctcctttagtaactaacagggtgctgctggtggatgatggggcgtcgctgacagaattttaacagaggcaagatgcaaccagatttcagggtgtaaaaggccactggggctacatgtgtacttggaagagggaacctggctggcaaaggtccttaggagggaggcctacttgtcattatggccactgggatactagagtaggagacgtcagagccgagggcaggaccagcaagcagcaggagcatcccaggcacccacaggctcctggcagccaggatgagccagcgcagaatgcagggttagcaaaaggccatgcgggagcccatcccagcaccagaacttgccttgttataaaacaggcattggaaactggctgagcctgggcccagcacaagagttctagttggcctacaagatatttgcatgtctttaagttagctccaaacactgggagagtttgactggggttttctcttgaaaaaccctggtgcagcattccagcccaaaaacaatggattggagctgagtagagggcagtccttcagatggaccctgtcctctcagggtggctgcggttcccacatcatctgcctggcccttgtaggtatttaaaactttcacacacacacacacacacacacacacacacacactcaaaaaagtcaagttaaaacaccagaaatccaggtggatgttggaaaagacaagcccagaaggaaagaaaggctgtttgagaaataatgaccagggaagattggccgtgcttgaggatggatgggcagaagatgtgaggaacaagtggtgatcgccaggtgactgcttgtggcctgctagagaatcaaatccaacattgagctcctcgtcctccccaaacctcctttcactgactttcctgtctcagttaatggcattccaaccttaggtgattagaccaaaaacttggagacaatagaaaataagctttaaaaagactttttaaaatctgctttactgacatatagtttatgaacaatgaaaagtattaattttaagcctacttgctgttcaatgagttttgacaaatgtatacaaccacacaaccaccattttaatcgagatatagaacatttccatgaccaccagaaaatttcttgatacttccttccagacaatactatccccacctcctcactccaccctccttccttgtgcaagcaaccaataagccttatttcactatagattagcttaacctgttctagaattttatataatcggggtcatataatacattatgtatctagtttttcttgcttagcatgtttttgaaattcattcgtgtggctatgtgtataagtagttcagtccttttcattgcttggtagtatttcattggataaatagatcataatttgtttttctgttcatttattttttggcatttaggcaaaatatgtttttctgttcatttgttttttggcatttgtttataatgtttttactattgtgaataaaactgcttaaaaattaagcagtgcacatttgtgcacaagtctttctgtggacctatgttttcttttctcttggggaaatacttaggagcaaaacttgctggatcacagggtatgtgtacatttaactttgtaagaaactgcctatttccaaagtcatgccatttaatgcttcccactggtatgggagaagtcagttgctccgtatcattttgaaaacttggcatcattagtgtttttaaatcattgtcttgaggtttaacttacatgcaatagtatccatatatttttatttttatttattttttgagacagagtctcgctctggtgcccaggctggagtgcagtagtgcaatctcagttcactgaaacctcagcctcctgggttcaagcaattctcatgcctcagcctcccgagtagctgggattacagatgcacaccaccacacctggctcatttttatatttttagtagagatgggattttgccatgttggccaggctggtcttgagctcctgacctcaagtgatccacccacctcagcctcccaaagtgctgggattacaggcatgagcccaccgcacccagccaatatatttgtagaataaggtaaatttgttctgataaatgtgtacatccatgtgacttccatatccaaattaagatatagaacatttccatctcccaaataagttctctcctgctccattatggtctcctcattaccatacctcttccctgcagggaacctctgatctgctgtctatcacagtagattaattttgcctgttccggaatttaatgtaagtggaatcttaagtatgtcctctcaccataatgccttcgagtgagattcatccatgttattgtatgaatcagtagtttattccttcccccacatgcaaaatgaattttaactttaaaaatcgtttttaaatctttacattatcaacatctttaatagtcacgaaatcattatttcaaatggcctaagcccatcagtttgtgtttcaaatgattttactacatcttaaatatctaataaaatatgtagttttaaaagtcacatatttgtagaatgaacctagtaaaggcttatcatgaagactgcctgttgaatattcctgttttccattatatccataagtagcttcttaagtaggatcagattatgacaatcagatcatctaagtttctatgaaggcaaaaatttagtgtctgatttttcagttttcacataaaaatgctgataagactatctgaaaaagtgaaaatactatcttaactatcctatgcttggttaattttccacaagatatttttaattgaattttttgagatatttgtagatttgcatgcagttgtaagaaataatatagacagtggccgggcacagtggctcacgcctgtaatcccagcactttgagaggctgaggctggcagttcacctgaggtcaggagttcgaggccagcctggctaacatggtgaaagcctgtctctactaaaatacaaaaattagctgggtgtggtggtgggcacctgtattcccagctacttgggaggctgaggcaggagaatcgcttgaacccgggacggcggaggttacagtgagccaagattgcaccactgcactccaccctgggcgacaagagcaagactccatctcaaaaaaaaaaaaaagaaaaagaaaaaaaaatacagagagatcccttgtacactttgcttaattacccccagttgtaacattttacaacactataacattgcagccagaatatcgacattgatacaatccatttattttagatttcttcagctttacttgtactcattggtgtgtgcatatatgtgtgtgtgtctatagctctacacaattctatcacctgtgtagctgcatgtatccaccaccacagtggagatactgaacacttccatcaccataaaaatctctcctgttgccttttttttttttttttttttttttttgagacagagtttcactctgtcacccaggctggagtgcagtggcgcagtctcagctcactgcaacttctgcccccgagttcaattctcctgcctcagcctcctgagtagctgggattacaggcacctgccactgcacctggctaatgtttgtgtgtttggtagagacagggtttcaccacattggccaggcttgtctcaaactcctgacctcaagtaatctgtccacctcggctttccaaagtgctgggattacaggcgtgagccactgcacccagcctcctgttgcccttttataaacacactcacctcctttcctcctgccccctcctaccccatctctagcccctggcaatcacactaatctatccttcatttctaaaatgtaactaatctatctttcatttctaaaatctatcctttgtttctaaaattcatttctagaaggtatattctagaatgtatacacacacacaacatggatgtatctcacccagaaggcttaatgtgagaggacatatttaagattccacttacattaaattctagaacaggcaaaactaatctacagtgatagacatcagatcagtggttccctggggagtagaggtatggtaatgaggataccatatagtatatataatgatacacataatatatggtatatataatcatatggtatgtattttttcactcaatatcaatataattcattggacagtcattcaagttgttgcatgtatcagtagtttgctcttttgtattactgagtagtattccatggtatggatgtaccacaatttgtttaaccattcacttcttttctttatatatatactttaagttctggggtacatgtgcagaatgtggaggtttgttacatagctgtacatgtgccatagtggtttgctgcacccatcaacccatcatctacattaggtatttctcctaatgctatccctcccctaacccccgtaaccccctgacaggccccagagtgtgatgatcccctccctgtgtccatgtgttctcattgttcaacttccacttatgagtgagaacatgtggtgttgggttttctgttcttatgttagtttgctgagaatgatgttaaccattcttttcttgaaggacatctggctgatttgagtttgaggctaataatgaataaaatatactatgaatatttgtatgtaggtatttgtgggaagaaaagtttttatttatcagggataaatatccaagagtgtaactgctgagtcatacgataattgcatgtttaatattttaaggaattgctattgttttacagagtggcaatatcattttacattctcaccagtaatgcatgagtgatccagtttctctgtattcttgtcagcatttgatattgtcacccttttagtttagtgattctgataggtatgtagtaacatttcattgtggttttaatttgcattgccctgatggtgttgagcatctttcatgtgcttatttaccatctgtatatcctctttggtaaaatgtctgtttacatcttttgcccattttctaattacattgttttttaactgttgtgttttgagagttctttatgctctgtaaatattagtcctttgttagatgtgtgattggcaaattctttctcccagtctctagttcattttttccatcctcttcacctgaactttcacaaagcaaaaagtttcatttttatgagatttgatttattaatttttcctcttatgaattctagttttggtgccaagttcatattactcagtagttttccattgtataaataccatatatctacatgtttcggcctttgacttgttgatggacatttgggttgcttccagtttgggggccattatgaacatttgtgttactgtccttttatatacatatgttctcatttctcttgggtaaatacctagatgtggaagtgctggatcatatggcgagtatatatttgactttataagaaatattaaactatttaccaaagttatagagttggattactacttaccatttttggccttcttcattactttccatagatccaagtttctacctggaatcctttacctttagcctgaagaacatcccttagaatttcttgtaccacagttctcatggtgacaaattgtctcagcttttgttaacctgaaaatgactttatttaacttatttttgacagatgttgtttactggatataaatataaagatctgggttggcagtttttctcttttgcactttaaaaatgtcatgtcattgtcttctagattccattatttacgctgagaagttagcagtccatttgtgccattgatctctgtatgcagtgtgtcttgttatgttttgttttctagcagctttcaatattttctctttatctttggttttcaaccatttgacatgatgtccctaagtgtgcttttatttatatttatatttacttatatttatcttttatttatatttatctctatatatttatatttttagttcactgggctattttatcttgcttgggattcactgagttatttttcaattgagaaaatttcagccttatatcttgaaatattttttctagcccatatttgtctcatctccttctagaactgtgattaaccatattggaccatttgatacattccacaggtcttgtccattttccttcattttttttccctctgtggtcctcagattggataatttctattgctctgtcttaagtttatttagctttcttctgccatcttctgttaacccactcttatgaccatccagtgatttttttaatttcagtttttatatttttcacttacagaaatacaatttgatccttttttaataacttccatttcactgctgagactcctgaactattcactcattaaaataatattctcatttagttgtttgaatatattttcctttaattccttatttttaatttataattccttatttataatagctactttaaattttctgtctgctaaatccaacatctgggccatctcatgctcaatttcacttgattacttttatttctggactttaggtcatgttttcgttttcctttgctattctagttattttttagtatctgttggatattatgaatgacatcctgtagagactccagattctgctatcatcatctaaagaatggtgatttttgttctagtagatagttcacttattagctgaccaccttgaacttatgtaggcttggttttatatactttgtcaggaaaaatctataaaaatcccagatatttgtgaagcccttctaatttattgggtctcaacctccaaattctgtttcctctaaggatctcattagggcttgattttaggcatttgcaaggcaggtctagagtgtactttgttctaggacatgttcctactcctcctctaatagcacaggggtgtgaaggcttgctgccccatcccaatgttttcaggcttttggtttgtataaggtaggagatgaaggaaataggtggtgtttcagccatagccaatcaccttctgcatgtctgcaccacccaaggaaggcttctctgatctcttgttctgccacgtctttctaataagcacccagggaagaaccatggagaatcttgtgagtgtgtgcaaattcgtatctggaactctcagttattcccgattgatatgttagaccaaactcagcttttaggactttatgaaaatattagctgatttctttccacccacttagatggtggcctcctcttcttcctgtgtttcactaaaggtaaaatagtttttgtgtttctgggttgccatgcaacctcaactctctgatggatttatgaaaagttatgcctttgcaggctgcctgagcttgttgttgttaagaatgggaacaacattcacgtgcagctttctacctcccagcagaagtggaacacctcagtaatgtccccttatagaaagacattacattgtacaagtagcactaaccataaaaaaaattgataaattaaactacattaaaagtaagtacttattttcattgaaaacgccattaaaagagtgaaacagcaagccatggagaagaaaagaaattaccaacttatacagcagacaaaagatttgtaccagaatctgtacacaaaacttctacatgtaaacaataaacagatatacccaatagagaaatgggcaaaagacttaaacagatacttcacaaaagaggatatctccagcaaatatattaaaatgtacttaatatcattagtcatcaaggcaatgaaaattaaagccacaatatgaatctacaatacccccaccaaaatgactaaagttaaaaagactgatgatactaagtgttggcaagaatacggaacaataggagctctcatacattgctggtggaagtgtaaactcgtgtattcattttgaagacattttggcattttctactaaagttgaatacttgcatatcatctaacccagaaattacactcctaggcacatactcaacagaaatgcactgcacacgtgcaccaagagacgtttaagatgtgtcctaacagcattattcatagtagccccaaactggagacaataccacacatatacacaaacatatccaatatacatacaccaataaacataaatgaaccacagtaatcacaacatcatggatgaacagtacaaacatttcattgagtgaaaaactaaaacacaaaagaacacataaccaataatttcaaaaacaggcaaaactagactatcatattgtaagttataaaagtggttaaatttgggaaggagagaaatttagtaatggggaggggcatgagggaggtttctatgactgtggcaacgttctacttcttgaattcatggtgggaaattgttttgtcataattcattgaattgtacatttatacttaatatacttctgtgtattatattct

SEQ ID NO: 308 - DNA, 48698 bp, Homo sapiens
caggagctgtgcaggcaagtagaaaagagcactgggagaacggcccagttcacagaagaggaggcagcaagtctgcacactttgtactatgctgaaattgttcaatcactcgacagttcagaaataaatataggaagattttgaaaatcctacctctctgctctgctccacagcactcctggaagcctgcactttccgtagaccttaaaatctcagaggtagggctgccaccaaggtgaagatgggaacgcagatgatccatgagtttgccctggtttcactggcccaagtggtttgtgctaaccacgtctgtcttcacagctctgtgttgccatgtgtgctgaacaaaaaataaaaattattattgattttatatttcaaaaactccattctttcctaaatattttcaacaaaggatttctttatgcattctgcctaaatacctatgcaactgagcccttccttctcagctcaagattcgtctggtctttccctacagctttgtgtgtgccatggccacatctcctgggtacagttcaaggagacatcttttctaaaagggtctgcgtgatcattaaaatataatcaaatgtatactggtgtgtgtgtgcacgtgcgcgtgcgtgtgtcatgctaaggaaggggcaagaaggaggatgcagagtgagttacagagatcaagtactcaagtgagtacagaaagactacagaagacttacctttatttggtattttaaatgaattccatcaggctgaggtcctgattctaactagctgaaaaaagtgaaacactgacatcttttttgctgaaaagcattccctgagcttgatgccacagcagttactgccctgtctcctgcccttctcagcccagcttcctgtaaggtggaggctgacttttctgtctcacttattattggctgaacatacagaatttggtcttctgcttcaccaacttacctgaatgtaccctggcaaaagtcaccgtctacctgccaactgttaaaccaattcaggtcttccattcctgagcccatttcctgcagttgataaagttgaccactccctcctccttggaactcttttcctcagtttctctgacatggcaggtctctgctttgattcctacctctctctgttcatttgtagtcttcactgtgggctcatcctactggcctggaaaccttagggaaatcttcctggggttttctcttgatctggtcagtgctcctctcactttgcaggccctccttcagtgatgctcatgactcctaggcatctgtatctatagctgtgaccccagcctccagcagtatccctgcacttatacatcctactacctacctgtgggtctatactcgagtcttgcagcagtcagaaacccaacaaatcaaaaattgaagtgatcatcctgttcttctctctcttgcttccctaaaccaactgttgttatagtatattccatatcagctgaagacctggtcatctacccaatcacataagccataaatagaggggtgaaatttcagttcgccattttccctcacactacatccagcgtcaccaagttctgttgattttgctttctaaataacttcagttggctcctttcttttcctgactcctaacacagcctcatcttatactcaaatacagaagtgcagataaggggtatctggacacaacattccacacctctctcaactgtctagtattcaagaaaataggactctgggtccactttgcagtccagacctgatatggaccgttttacacacagccctgctttcctctgagcctatcaacgatctgccttatttaatattaacctaaacttaccccaaatcctataactctgccttttcctttgtttggtgagataccccatggctcccctgggacgcagtctgtctcattgcaatggatcaataaacctaattttattacactacaggtatattcctggaagtcttagacaactgggctaaaacaaaaatattcaacatccattcttaattattaaattagttactaaaataggatagacagatgttatttggccataattttatatacatgtaaacaaaagctaatacatacctaatgatgaagaaacagaagcattcctactaaagttaggaacatgaaaaaaattgattactatctatcttattttacagtgttttagaacaggtggccaatccaattatacaagaaaaataagttataatatttaaagaaatgccaaaattacttttatttgtaagtgattatacacctaggaaatccatgagaaccaaataataataaagtattatggccaggcgcagtggttcatgcctataatcccagcattttgggaggctgaggtgggtggatcacctgaggtcaggagttcaagaccagcctggccaacatggcgaaaccccatctcttctaaaaatacaaaaattagcctggtttggtggcacacacctgtagtcccagctactcaggaggctgaagcatgagaagtgcttgatcctgggaggcagaggttgcagtgagccaaggtcgcaccagagcactccagcctagtgacagagcaagactctgtctggaaaataataaaaataataataataggcagggcgtggtggctcacacctgtaatctcagcactttgggaggccaagtcgggcggatcacctgaggtcaggagttcgagaccagcttgacaacatggagaaactccatctctacttaaaataaaaattagccgggcgtagtggtgcatgcctgtaatcccagctactcgggaggctgaggcgggagaattgcttgaacctgggaggcagaagttgtggtgagccgagatcgcaccattgcactccagtctagacaacaagagcaaaactctgtctcaaaataataaaaataataataataataaataaagtggtaaaagtggtaagataaaattcagtaaagtgaaaggaaatattaaaataaaaaataactttcttttatacaaataatagtgagttaggacaataataattaacaagaataaataaaatgtatcatttagtaaattaataaaagctacatttaaaccacacttatcaaagtaaaaaataatgtaaagaagacatattgctttggataggaagactcagtattgtaaagatgtcaattctccctaaattaatcaatatacaattttttaacttgacaaaatgatactaatcctcaactaaaaaacaaaagtgagacagataagaaaaattctgatgagagtggaagagctcttccagctgttaaaatgtaatgataagctcctgaaccttggccttagcaatgattttttggctatcacatcaaaagcccaggccacaaaagcaaaaataaataaatgggactacatcaagctgaaaagcttctgcatagcaaagacaacaagcaacaaaatgaaatggcaacctatggattggaaaaaatatttgcaaactatatatctaataagatacaacaaattgataaagaactcatacaactcaatagcaggaaaacaaatgatcccagttaaaaatgggcaaaaacctgaaaagacatttctccaagaagaaaaatggccaagatggatatgaaaaggtgttcaacatcactaatcataagggaaatgtgaattgaaaccattatgagacactagataataataggatgactattatcaaaaagtcaaaagatattaatcataaacgtggataagggtgaagagaacagaaaacctttgtgcattgttggtgagaatgtacagccattgtggaaaacagtatggaggtttctaaataaactgaaaatagggctacatatgacccaacaatccctctttaggggatatacacaaataaaatgagatagccaccttgtagagataaatgtgatcccacgttcattgcagcattgcagccaatatagggaagcaacctaaatgcctgttgaagaatgaatggataaagaaactgtatacacacacacacacacacaatggaatattattcagccctaaaaagaatatcttgccatttgccacaacatggatgaaactggaggatattaagtgaaataaggcagatacagaaagaaaaatattacacgatttcactcacatggggaatctaaagaaaacactcaaatacaggtatacagagataacaaaacctgaggtggaggagggtggagagatgtaggtcagaggatacaaagcagcagataggagggctaggcgcagtggctcactcctgtaatcccaggactttgggaggcagaggtgggcagattgcttgagtccaggagtttgagaccagcctaggcaacatgacaaaaccccatctctgcaaaaaaaaaaaaaaaaacaaaaaaaaccccaaaaaaccaaaacaacaacaaacaaacaagcaaacaaaacacacacacacaaaaaaaattagcgaggagtgctggtgcccacctgtagtcccagctactcaggaggatggattgagcctgggaggtcgaggctgcagtgagcagtgatttgatcgtgccactgcactccagcctggggacaggagaccccgtctcaaacaaaacaaaaccaagtagcagatatgcatgatgaacaagcctagagatctaatgtacaacataaggaccacagtataggtaataaattctactttatttgggattcctccttcactgtagtaatctttttttaactatgtatgtatctcataacatgttgtataccttaaatatattcaacgaagcttattttaaaaaatgaaatgtataatgatgactggaaagggtggtagtcacatggaaataatgaagcagaataaaagttccagatattaaatgcaaatgagaatttattacatgataaagctggcattatactcgggggggacagataggctactcactgaagtgtttagaagcagagtagctgaaaattttggcgcagaagaaaatctcgtggacctccaacttaccggttaaagtaaaaactttcgaaacgtataaaggtttaaatataaaattaaaatcgtaaaaacaattactatgttaacatatttcttatatagtacttagattttccaacattccacaaacctagtagcaattaaggaaaatattaatttcagatcatataaaattcagaagtcctgtaagacaaaaatagacaaataaaatgtgaagatttttaagaaagaacaaagggctaatctatattttgaaatcagtataaaaagacgaacagaatttgagatgtgagcgcggacagctctgctgggccctccaggccctccgcccggtagaacccggagccctggccgcggctgccccaccgggcccatttcttgaagcagcggcgaaccacttttcctccccgacctgccggctgcagggtctccccgcccaaccctgccaggctcagacgaagcttctgctgagccgcctggacgcagcgcccctgggtggcggcaggtatagcagggcgggaagcagggaggcggccccaacgccgcggaggccaccagcgggtgcagagggccaggaaagctggtctgcgcgcggctcagctgcctccgtaggccatggagccgagcagatccgggtcttcgggtggccgcaatgtcccaagtggacgacacccacctagtcccgaggacaaccgacaaagtccttaatgggcccagaaggtgaggggagtccggcaatgaggggtggtagggttagcggccatcgcccagctcgtcttccttctaccagacgctggtgctggaaaagagaagtgtaagaataacttgcgccattaggcccatcggaaaggcccaccaccctttaggaagattactggctgtttatagaaggcccgtgtatatcctatgaagaagctgctctcaacttcccccccagccttttaaaagaaaacatttgctacatcgagccgttctaggtgtaaagaggttgtgacttatgatagagttagaaaatcacacatcttgtaaattcccatttgttaaaaaaataataataataataataataataataataataataggacataaatggcttctggagatgactttttgcaatgaagttgttagaccacctctggaagtgacagcaggagccacacatccacgtttattaagtgagttagagcaggagtccccaacccctggatctaggttgcacgctccttatgagactctaataatgcctgatgatctgaggtggaacagtttcatcctgaaaccatgcccctaccttccatggaaaaattgccttccgtgaaaccattccctggtgccaaagaggttggggaccactgggttagaggacatggggcagaagacctgagaaggaagagaggacagttctgtgccacactggtcatatttagaagacattttcatattccaaccattgttctgtgtgtgcattttatttctcacgactgtatatgtagttaacaatactattttttagggaggtgggggggtcagccccccgcctggccagccgccccgtccgggagggaggtgggggggtcagccccccgcccggccagccgccccgtctgggaggtgaggggcgcctctgcccggccgcccctactgggaagtgaggagcccctctgccaggccagccgccccgtccgggagggaggtgggggggtcagccccccgcccggccagccgccctgtccgggagggaggtgggggggtcagccctccgcccggccagccgccccgtctgggaggtgaggggcgcctctgcccggccgcccctactgggaagtgaggagcccctctgcccggccagccgccccgtccgggagggaggtgggggggtcggccccccgcccgaccagccgccccatccgggagggaggtgggggggtcagccccccgcccggccagccgccctgtccgggagggaggtgggggtgtcagccccacgcccggccagccgcctcgtccgggagggaggtgggggggtcagccccccgcccggccagccgccccgtccgggagggaggtggggggggtcagcccccctgcccggccagtggccccgtccgggaggtgaggggcgcctctgcccggctgcccctactgggaagtgaggagcccctctgcccggccagccgcccgtccgggagggagagtggggggtcagcccccccccgcccggccagccgccctgtccgggaggtgaggggcgcctctgcccagccaccacccggtctgggaggtgtgcccaacagctcattgagaacgggccaggatgacaatggcggccttgtggaatagaaaggcgggaaaggcggggaaaagattgagaaatcggatggttgccgtgtctgtgtagaaagaagtagacatgggagacttttcattttgttctgcactaagaaaaattcctctgtcttgggatcctgttgatctgtgaccttacccccaaccctgtgctctctgaaacatgtgctgtgtccactcagggttaaatggattaagggcggtgcaagatgtgctttgttaaacagatgcttgaaggcagcatgctcgttaagagtcatcgccaatccctaatctcaagtaatcagggacacaaacactgcggaaggccgcagggtcctctgcctaggaaaaccagagacctttgttcacttgtttatctgctgaccttccctccactattgtcccatgaccctgccaaatccccctctgtgagaaacacccaagaattatcaataaaaaaataaattaaaaaaaaaaaaaaaaaacaatactattttttgaactatctaccctttctagatgttctgaaatgcctatgttaaaattagagatagtaaaataacacattttgtaaatctttttgttaaaattcatatgtaatgttgttttggttggggggggtggccaaaccacctgttaataatacacattgtgtttgtgcactggttcaggggaggagagaggaaaggaagtgtaagagctctatgccaatgtgcttatagtgaggcaaggttaaccattgtctcatgcctgggcattttgttttacttatctgggtatattgtggatctaaaggacaaatgagtcctgactttacatctagtctttctagatgttaaagaggttgctagtgtatgacaaaagtagttagtaaactaatatattttgtacatttcgttttaagattcccaggaaagacagtcttctgaaaatttgagcattattgcccagtgggttgatggagatgggaaggtgtaggccagaatgttcatacttggaagactcagtcataactgtttttacatgtgttcactttattcaagacttctgtgcatatagtggacgaattaacttcttacctgaaacatcttatctatgtagatgttcagaattgcctgatgtatgttaagtgtagaggtagtaaaatatcaccttgtaaatatctttttgctaaaattcttgggaagtactgtcttttggaagtggaattgtgaagccacctctgtaagcagtatagtactgtctatacttgttcaatggtttagaaatgggagggaagaaattgccaaaggtaatatgctagtgtgttcatacttggacatttcacttgccatttttctgtctgttttgtgcattttgttttgctgtgtatgtagagtacataatggacaaatgagtcctaattttgcaacatttggtctctagatgtttaagaagttgccagtgtatgacaaagtatctagtaaaattagcacattttgcacactttgtattgaaattcataggaaagcttgtcttctgtaaatgatttttgggtatgaatttgttcagccatctctaagcgttacacatgcctgtacctgtccactggattgaagacagagagaagggagtgaggaaggactggttcaaggtcaaaattgtcatatttagaagatacctccgattatagccactgatacatgtgcaattttattttacagtgctatgtacacagtggaaagttatatgaaatatctggtctctctagatagttagaaatgcttgatgtatttaaaagtagaaatagtataataacactttttgtaaatagcttttaaaaactgatgggaaatactgtgtttgcaagtgggattgttaaatcacctctgtgaacagtgttacttgttcattcagttgaggaaggtgagagggaagaaattacaaaagatgttttgctattgtgtactagaaaatttcagtttatccattgccttatatgttaaatgcattgcaagtaactttgctatactacatattgtgttatatactggaaaaatgagtcctaattttaaaatatccactctctagatactaaagaggttgccaatgtatgacaaaaatagtaaagtaacacattttgtacactttgtgttaacgtttataaaaagactatcttctgaaaacgacttttggaagtgaaatgataacatcaaccctaagtgacacatgggcccatatccaccaggttggtggtgcagaggagctggaagaaatgaaggattctagatcagaatattcctatttagaagacagtttaagataaaccatgtgtgtagtttattcaaccctactgatgcaagagaatagggtctggaggcaggaaacataaagcagattcatgcagacttcctagaaataaatgaaatggaaacacatcagctatgacaggacatatactctccaacagagtaaatgactttgtaactttatttcatcctctccatttacatagggcgtacatcaagtaaatgactagggtgtatactaagtaaatgactttgtaactttatttcatcctcttcatttacataaggcatataccaagtaaccaatggaaaccttgagagggtatttaaacccgagaaaattctgtaactgggctcttgagcccctaagcacaggccttctcccaccctgtggagcgtactttcatttcataaatctctgcttttgttgtttcattctttccttgctttgtgtgttttgtccaattcttggttcaatatgcccagaacctggacaccctccactggtaacatattttggcaaggcagccaggaggtaagcccaaagtttgggatttttcatcttttcttttccactccatacaggggaatctctccctctgtctctttttcctttccaactcgggacccttggtgggcagcgcctaaacacggaggcaaccgcaggtttctgggtggggccatcctgaaggacttttttctatcttttctggttgtggtccctgattcctatgtgtggcgcagctcagggcaaacttgcagctcagggtgaacttgcatgtgtttcaggcgacggaaaccctacttgactggctaaggacaaaagaagcctactcagcttccatttcctatcattacagttcatggctatcatgctagtggaacaggaagcatgggataatgtggccttatcaaattataaggatgctaaacgccagtgattacacccaggaaccaaaggacagctcacaattgcctctggagggaaaatatgcaaagcggcactggtgcccacgtaaggtcagagatgcctgacactcttaagactggaccccaaagggggattccccaggggatcctccagacttcaacctctccaaaggggatgcccttggcagcagttctaaggactagtactaagccctccttagaattttctcttgcagttgcaatactgtttggccccaatatggtttggattctggcatttgctgttgaatgggaaagcgggatgcagttgcatgtatccaggctttggtgctgctgttctaagcaggggcaggcctagttattatgtgatgttctcctttggtgctgtttgaccccagtgttctttcgagtctggggaggtttggcctttaaaaatcaaactgccatggaaattgctttacctgaaataatagttcacagccttcattggattgcttattgggtacacaaagtaaaattggcaagcttgtattgctatctcatggttagggttccaaggtaaaagctattgaatcttcatttgtgtgtgtgtatacacatgtctagatgtgtttatttgcacatttgttatatgttgtgttttggcatataagtaaaagagcactcataaattaagtaaataagtcgaagcaattttcaagttcacatgacttaagtataactttcctaaacaggctagttttaaaattattggtgaagtaaaaatagaaatgccttcagaattgtcagcatatatttttgtctgggttttatatttgtctctgctagatattttgaggtgttagggtttggcatagaaggttataaaactataaacccagccaaaacaaaacgatctcgtttgcgtttttttttttttttttttttttttttttgacaaatgagcataatttaatgttagctaaatcttctgggttactggcaaaaatacgtatgtattaactttgaggctcttacttaggtttaagtgcacacctggctattcaaaatgtggttaacagggaaataactgactttaaaagatagtgtctaacatttcggtttacagaggtaatctagataaactgttaaaagtgaaacaattgagtacagtgaatgggacaaatgttttagataagctttttgtgtaaagtcttaaaatcatttttgatgctcatttaagatctgggccatttccaattagaaaggttgtgatatggggaaatatgtttctaaaattgtggaattgttcttaactataaattcccatatctgatagttcaggatttctagctttttagcgtttcactaaagttttaggttactaaggataagaattctagttaacacataattctgtatacaaaacatgccagaaagtttgtgttattagtgagaaaaagaataatttagaagttatctaaaagttagttcaaattacagatttgaaaaggttacttatgaaacaatgtagtaaggaaccagtaagtagaggagaacgatatggaaaaagtttagataataaaatattctttaaaacctgatagagaattggagatatttggctaattaacattttcatagtgaaagctgttagtcttgataaaagtaaaataagcattgtaaagaaatgcatcggcagtttggcaattcctttttactatagttaagcatgaagccggatttggtgtggagccaaatttcacatacatgcttgcattgcttcacactgtttactgttttgtgtggatagtgctggcactggagtacttattggttatgtgcctatagtgtatttcttgattgcacaggatgtatggtgatattggtgaacttaaggatactgaattgtgtatcaggaacaaaatattcattatgtgggttttggggggccctaggtaaacactgtagcctccagggtagattgagaaggaaaaatttagggttgggttcctatttgtttttgcttctaattttcatttgtttgccatttattctcctctggctttgcttgtgtatgcacatataaaatcatatatattttttttaaatttctagtggaaggcttttatttggttctgtgaatagttattttgttccctatgcatttctagcaagtcatcatttgttccatttatctggaattcctaggctacctttgtcaggctggcaggaattgatggagcacaccagctttttaaccttgaactaactcaaattctgtttatgatactttaagtgtgttgagtatattttcataaacagaatttgagtcatatttctctgtctgcccattttctccaaaattcgtaaactatttgtgaatattcttaattcatggcaatgtgtttgtttgcatatagtcaagcagggttcctagggctgctttgggagacagaacccagaaacctggcatactggcaaaagggtaagaatttcttaccagccagactctggtctctgtctctctgtgcaaactgcataaatgaatagtaaaagtcactgtttatctcctctgtaaagttttgattaatataaaaaaagaattctgaggccgatcttaagctgtagtgaatctggtgtgctttgtgtctttctgtattgttttgtcataaagaggggtaccttagaataaaatgtgtgcttaggaccccatagacctgctgttcaagacacaccagcagactggtcagtcatgtctttgggagcttgaccttgtaaccatgtggccatgctttctcttttcacagtggcagcctgggtttagggttcaattcctggcttagggaatgagtcctttatcttctgtctgtgtatttatatgtgttgtgtgtgtactataaaagagcattaattaattagcttaataataataagagcttaaatcaaatattttatcagaaaagtaaaaaatgtaatgccttctatttacttcatgtaacttaagtaatctttgggaaataaagacagttttaaagattattggtaaaataaaaatatcttcaaaatgtaaatatttagtctaaattatgcaggtcagatattagatttgcaaaatgctttaaggtcataaaccgcttctttgacttttaaaaattgctcaatttattttggagcattagattctagataaggcctggggacaaatagaattagccatgtcccctagctatgcaaagaaggttataaagaaaggagattttatataagaaaggatcttatatcgtaaattcgtgtcctaaagtaaaataagcggttgttaaaaaagagggatgtttaggacaagttagaaagtcaaagcatgtcgtagatggtctgtgtaagtcatgaaataatttacaaaagagaatttatgcaagaaatatacaatttaacggtgattagacctcctaaatgcttcataaaatgccactatgactcttaactctacaacttgcctgctttacagctcggtaaggcctgagacacgtggagtcagatgctggagtcagaccttaagtgtacttctctctgggtcctagactccacaactaatatataattaaaatccttaacttaccaaagttttcaccaaaagtaaaactcgctaagagttaacattgtaacatgtaagtgagactactgaagcaacagttttacatgcaagttacgtaagaaaagtgaatgcattttcagtgaaagattataacaaggcatgggaatgtagatttttttttctgtctaaagggttaaaggattgttttaagttaggataaagctaaaagtttgaatgagttgtggaagatttataaaaattaatattgtaaaaaattatgtgtgtgaacatattgactaaatttaaaggggtattttctggtttttccataaattgaacatcaaaataaaagcacaaacagggttttcttaaagcaccgatctgctctttaacaaacatttgtaaaggattataaaaggtttatgagaatctcaccttatggtcaaacggattaagattggaaagatatgtctacaaggttttcttaaaaattggggttgacattaatagcacactaatgcaagggtgaaatttggctttctctcttgaacaagattttcatgcagtattaaaagataatgaaagatctttgtttgccttttgaataaactacccccccaccaaaaaaaaggaagggaaagacaagagacagattgtttgtaaagtaagtcttccatctatcaacatggaaaggtttttgccttttaaaacatttttgagtcatcattttgctaaatgaatgactatggtaacctggaattccatttcataatgtcaagtgttttaaatctttaacatatttaataggcttcccaaaatcaaatttcagcttcaaaattgtcttttctaacctctaactttgagatgctgcagagggcccctgaagcatccaaaagagaggtaaacagaattatttgacatgtttaattacatgggaagcattgtcaaaaagaaaaaaatttaatcttcttcaggttatattttagtgaataatattaatatatgttccaaaattgtatgagatttctaaaattccaatatgtctgagtatatgctatcaatcataattatgattattatgttattgtagaccacagaaataaccaaatttccttgtcaattgtgtttttaactataactatttaaagtcatttccacagttaattgcttaatgctgatgcagtttctgaaaacttcacaagcatgcaaagtcctagaatatggtgtcttttaggagattcatgaaagattggaaaggaccctaaaaagcactcttgaatacaggtttctaataagtttagaattatatcatttgaactgggtaagaattcctggaactttaatgaaaagactgactgagttctaaaactgctaacccaagtagaacaaaaattaattaaataccaagaaaatactttgccagattttcatgctaaatcagctgatactgaaactgtttagatataaaatttgaataaactccatcatttaaatcaaattacctatgataacccatcagttatcagtgttatgcacctaatttggggaaacaactggtattcaagaggatatgagtctaatgttaattaagcatgaactcatggagaaccaggatggccaccttgtccttcctaagtcgttaaagcttttgttagtaaaatttctgcattacatgactcgtcacggaaaagataaaatgatccaaattgaatatattgatgtggtgacttataaattgctaaaatagtttataaccaatgtttggtcccatattcctgggaaaacaatcaaagcttcaggtacatccagtcacctgataggccatttaaacattttatagagggattttattcaattgttattttcagtgcatgttttctggttgtataaaagctttcccatgcaagagggctgatgttataacactaagttattatgccaccaagtattttcacaaggtaaagaaagctttttatggttcactgaggacaatcaactccttcacaacctagaaactgaagattgtatcttctgaaaacattggataaagactgtccttgccatccacactacagcaaaacttctggactttgaactttgggttcatgatctcacaactgagaagagtccctccacactcttggaactgtacacccattggaacccttaaggtaaagctaaccagggaagtttctctcccgaagaagatggcatccttgatgtgaacagcttttcccaagatcatgaatcaagacttctctattatcatgagactcttatctttgaatattttttccttgcttttgcctctatgaagaatagaagtggaaaaaggatctgttgtgtacaattatgggttatacttttatttgtgaagaattttgcagccagctttaggtcctttttccatgatttggaataaaagaggcaaatgtatccctcataataggctccatagcagtttactgtaaaggctatggttacataatagactaaattatcttaagaaagttatgctaaataatagagttggctaaacagaagagtatctgtgcagctgctggcactcatggcctatggagaaaacatcaggtattatagagattcagttgtagcaaattaatgaagagactgcttagttaagtgagtagactctttagctcattgtttaatctatttgagtttaggaggtttggtttatggtgaccctggataaggagcatacttactctcaactcttggtattatcctcctgatagtcataataatagtctccctggtgtgctgtattctctcaacggttttaaatgtttgcatgctgccacctctagaatgtcaaatggcctctcttcaactggaatgacaagagctgaaagaaattgcagccatgaggacactgtaacctacgaatgatgtgctgagtccaaaagcccaaagtgttggtaactgagagtggtgctaagtaaggccctaagttttggtcacactctcacttaagtgagaacctgaccaaaaaagtggaatttttttttttttttttttttttgagatggagtctcactctgtcacccgggctggagtgcagtggcacgatctcggctcactgcaagctccacttcccgggttcacgccatttttctgtctcagcctcccgagtagctgggactacaggcacctgccaccacgcccggctaatttttttgtatttttagtggagacggggtttcaccatgttagccaggatggtctcgatctcctaacctcatgatctgcccacctcggcctcccaaagtgctgggataacaggcgtgagccactgcacctggccaaaaaggggaattttttttaaacaaaattatgggaggtcatttttttgtactgagcccatgcgccaggccccaacagaccaaactaaaccaaaacggagtcacgtatgccaagaccttaaggaaacacatagatcctagaacagaccacaggccaggttttgtttttctcctacaaatctctataacaaacattcctgacagcatagatatccaccccctgagttcccattaaatcttttaaccaaattaatttcctctcgccaaaagaccatcaagcttcagatgatcatgcaacaaaagtttcatccagttccaccacccctggccatcaaggagctaccctgccttcactagaaagagcagagcaggacttctgtgatcctcaataggtagggactaggcctcaagccaacatgaagcagttacaaaagaaagaccatcggcccctccacctcccataaagatttatggggatcccatctctggagggaaatgaggcagaagaatagggtctgtaggcaaggaatataaggcagatgcatgctcacttcctagaactaaatcaaatggaaacacttcagctatgatgggaaatgtcttctgtatttacatagggcatacactgagtaaccaatggaaacctctagagggtatttaaaccccagaaaattctgtaaccgggctattgagcccctatgctcaagccctctgccaccctgtggagtgtacttttgttttcaataaacctctgcttttgttgcttcattctttccttgctttgtttgtgcattttgtccaattatttgttcaagaagccaagaacctggacaccctccagtagtaacactactggacatatagtggacaaaattaagtccttatttgaaacatctagtcttctagatgtttagaagtgcacacagtatgttaaaagtagaggtagtaaataacacattttgtagatatccttttgattcatatgaaacattgtcttttggaaattgatcaaaccacttcacattatatttatgctgattcagggaggaaggagcagaagaaagtgcaaagggctttatatcagtgtgtttacagtatgacacaattgactgttgtcccttatatctgcatttccttttactttgctgtgtatacaaacaaacatttacatagctttggaattttgaattggtaaatattcatgatgtgtgaaaaagcatgatacatactgtatgatcccaattgcataacattggatggtgtcctaatttataacatctagtctttctagatgttaaagagattgccagcatataacaaaactagagttagtaaactaatacattgagtacactttgtgttaaaaattcataggaaagattgttcttaaaaatgcttcaaaagtagaattgttaaaatcccccctaagcattacagatgtttatacctgtccactggattgatagagataggaaggggaagggctttaggccatgttcctatttagaagacacatccaaattatagccttgctttgtatgtgcaccatttattcaatgctactgtgtataaagtggaaaactcaagtcctatttaaaacacctagtcttcttagatgtttaaaagtgcacaatatagattaaaaatagagggctaaagtaacaccctttatgcatttttgtggttggtgttatttcctagggatggttgcatttgagaatggaatttttaaacttgatgctgactgttcatcaggtgtcggcaggtgggaagaggaggaggtatgcagggagaagggttctgggcccgtgagttagattagttcagatgatctagccattgttctgtatgtgaattttagttaatattggtgtgttttaaagaataaacaagtcttaatgctcaaggtagtttaaaagtggaggtagtaaaatatccctttataaatgtccttttgttagtttttaggaagacctgccttctgggagtaatctttgttaatccaccccttggagctagacatagtcctgtacttagtcactggcatgctagaagagggagaaggggaagggtgaagggaagggctttttgctagtatctcggtatccagaagatagtgtgagataacagccataggtctaacagcattttagtaaagtgcctgcatttattgtggacaaagtttattttttggaacacttaacctttatgaatgtcctgaggagacaatgtatgattaaaagtagagctagcgaattagccaatttgtaaatatctttttgttataattgatagaaaagatgcatattggacatggaattgttaaaccaccactgagcagtgtatatcaggacttgctcattaagttggcagcaggggggcaaaaggaagcataaagggagagatatatgcagatatacatttacattttgatgatagccactgatgtatgtgcatctctttcggctgtactataggaatacattaagtaattcagtgaaaatatgccttcttgctaatattttcatggcatagaactactaatgaattctcttagaaacattatacttagtgtattctgttgctttatgtttcattttaaattgaacattaagggaatgcagtattttaattggaactctgccaatgcttttatctcaaggtatgatgccatttttgtcttttataaaatttttgttccaagaaaggcaggattacattttttcctaatagattgagttggtgtagtgttttcttgactatcaaaatactcatatagctttaggattttgaattggtaaatattcatgatgtgtaaaaaagcatgacacataaaattgcatgatctcaatcccataaatttggatgttgttgtctatacacacacaggacctagaaggacaagtcaaactgtaaactgcctgtgattgtggatgactttgctctttgcttcatgtgttttccagtttcctaaaatgcacgttagctttttaaaaataaaagatattttaaaaacattaaaaaagagatgaacattgtgataaaaaataggcaaaaaatactagagacagttactagataacacacatagagccaacacacatctaaaatttgaagcaactcactcataaagaaatagaatgcatgagaacatgcacttttttagatcagctaaagttaaagaaaaactactaatacccagaggtgggaaaggaatagagaaaacagttacggttactacttttgatgtgactctagattggagaaatctttctctagagggatgtttcgccaaatctattatacttcaaacacatatgtcctttattcttgattgcacttctaggaatatatcccatggaagtactctcacagggtgtttataataaggtgaaaaaatgaaatcctaaatttccatcattagaggaccacagtgatttaggatatatctaaacactgggatactctgcagcatttacagagagtgcagtagagctatatgaactgctggggaaaggtggttcagtaaaacaagtttcataatcagatgtatagtatataatcatatatttgaataaaaacatgaacatatatgcttgcgtgtgtgtgaaaggacagttacatatgagcagtagccttggaaggacagagaaaaaaataattattttaattttgcatttttatgtaccattcaacttctcaaaatgaagatctattacctcaattacttttttcaagtggctctcggggagaagtttaatagtaaaataatctgaattttgcagttcctggtattatgcaattgtgtattttaaggtctaaggaaagtatgcccagataattctccaaaggtcccagctagattctgttaatatcaagaaggatttagaagtagaagagaccccttctgtgtttaacagacaaaaagttatccttgaatgtgaaggaaaaagtgccattgggtggaaaaggctgggaaggatgaacagaagttgaatggaatgttcccttgtagaacaccatggttcctcttctcatctacgtcactgtaacgccagcatgtgcacttccacatgccagcgagcagtaatgacagcacgctttcagtaaagccaggacagctgtggctgacatcatcttccttcttcccccagggacgaacctagaagtgtggcactgttcctctgtagtaccaggcagcctatgactgaggctcagggctgtaatctggcctggccttaaatccccctccttggtctcaaaaggttaagacatcatttgttctctgtgctgctccatcagcagatagggaccacctaggacctccgggtgtttccttcccagatcaagtcatttaaataagtgcaaactgggtgcctgctaagagccagcagttttggtatagagccagaccttccctatgcctacacctgaaaaatgaatgattacattgtacaatgtatgctgtgggactgtccaaagtatcagagctgaataagcttagatatggtgcaatcaagtgagtgagtcagctctgaagtggagctctttgtcaggacctcttgtgtttccagtggactcacctttctccccttccatcctttaagggactggagggagctgcccaagctgcctggccagatgtctgtggactaagtgtgactgatggatataggggactgatcctacttgtatctgacgaagaatattgaatgatgttagagaaaatcctaaatggtgcctctattcagatgtaattattcttaccagcagattctactttctgagaagctaaaattagaaattaaatttggtaggctagggtgacatgtcctcaaacccgctaaggcagggatgtgaagcaggaggatgtcagacaggagcctggggcacagcaatggacacagtaggcctgggatcattcattcaacagttgaccagtgcctcccatgagccaagtactgttcagggatggggaatacagaggtgcatactataatctctttaaaaataacgtgttcgtttgtatttactgctcttatccatacagccttcttattagtacatatgtacagaggaatgtcttaaatatttatcagatactataggtagaaaaatagaggtgatttgtggctttcattattgcttgagtttttaatataataagcatgtgttaaattctgtttttaaaaatcctctaaacgtttttttaaacaaagccatagcaggggaatcccatgattggtatccctaggtctgaggtatgttccattgtacattggagctttggggagcggatggaagaaggtgtctggtgaatgggacattttagtttatggaagagaagagaaaaattccctgactacaactggtttcattgtaactttccatctgctattggaatcaagaactaaaaacttatcagcaggcagcagtcagtatcgcatgtccttcctctgcattcgtgcccacggagctcctgatggagatgggtgagtacagggaagcaactaatctcacccctcctgctcattcctgagaatgggagtgctaacttctcactgagtgtgggagctgtgcacatttcttctgcccaggaaacatactgaagaaaaaaagtctcttttcttgaaccttttttcttcctttcccaacttcaccaccacggcagccctcttcattcacatagctctgaccaaatatcctcagcgagttaagacagttacggttggaactctccgtgtctggctcttccttcttccctgcatctttggtccccagtcaggaggtctaatggtaatatccagtgatttttctaaagaggaatcagtggttatattatacaaggggtgtgtgcgtgtgttttgggtggtgaatacagagcagcggttaggaccataagaaataagagaaatggaatgtggcatgaccgctgccagttctgatatttttgaaattggtaatttaaaataaagtagttggtttacttacttaagcctcacatcttaaccgtccttccttgatctggagttcctatcgcctacctttatcaattaaaaatgccttgaaaatgaatcctactatgttaaagcatacggttaagtagatagaagcccaattgcctgggatgaagtcccaagtctgctcattactatatatccttggggaggttactcaaccctgcttcagtttcccctctgtaaaattagaaaatgagtcagtgtgagaattaaacaaattaatacattaggcagggcgtggtggcttgtgcctgtaatcccaccactctggggggctgaagcaggaggatcacttgagcccaggagctcaagaccagcccaggcagcagagagagactgtgtctctacaaaaataaaaataaaaaaactacctgggcatggtgtttgtgcctgtagtcccagctatttgggaggctgaagcaggaggatcacttgagcccaggagttccaggttacagtgagccctattgtcactgcactccagcctgggcaacagagtgagaccctgcctgaaaaaaaaaattaaaagtatttagaatgatgcttggcaccaggaagtgctcattaacattagaaactatcttcatgccccactgtcttccccatacaccatagtcttgcttccatccccacactgccccatcccttgcttatccccttgagctcagactcattcaaagccttgtcaaaggagcctctctgctacagaagatgctactgaccacttataggacatgtctgttttactcctgtgccactgactcttccttcttaggcttttttgtgggttcctttcctcattcttcatgttctccatgattttaatgaccacttatttattcctgactcccaaatgaaaatctagtatatacttgtggaactttatttgtgtttactcatcacttgcttgacataagcttttagatttcccagaagcacctaaaactcaacatatagaaaagagacaattttcattctggctactcttacgttggatccacagccccaagccctctcccgttgaggtccctaattcatttaatggctttctcatcttcctagtcacccacacccaccacctaggatgcagccttgataacattccttttacttaattcacaatatccaactaatcacatcctacgtattttaactctcagacatctctcaaatttgtgctctcattttcatacctatttctgtctctgtattagactctgagcatcctttgcctaaatactgcatcttttgcctaaatgctctcagctggtctctctgtctgaagttttttttttcctctcaagtcatagtcctccatagatctgtcaattatctatgtcaccccaaatgaaacttctacacttgatcttagccaaaaggccgagaagcgatccccaaatgaaacttcttattgcattctggacaaactcttaagttcctcaacatagcacagaaaatcccttctggtctgattcctgccaacctttctagcttcatctcctgtcactcctacttaaattactgctctaatcaatttttatagattttataattgatgatttggcatctgttgatcactaggccaaactaacagccaacattgtttacatttcccctgtggcctggcttttgagggtgtgcctaaatcatattgcaaatcttcctaatacaacccttaacatctgtgtttcgcttcttgcccaatcaaaaacatctctatctagctactcgctgacacattagtaataaaggaagagtcccagttccttttttttttttcctttttttggaggcagggtcttgctctgttgcccaggctggagtgcagtggcatgtgatcacagctcacggtaacctggaattcctgggctcaagcgctcctgcctcagtctcccaagtagctgagactgcaggcatatgccaccatgcctggctaattattttttaattaaagaaaatgttttaggccgaggtgggtggatcacgaggttaggagatcgagaccatcctggctaacatggtgaaaccccgtctctactaaaaatacaaaaaattagccgggcatggtggcaggcgcctgtagtcccagctactcgggaggctgaggcaggagaatggcgtgaacccgggaggcggagcttgcagtgagccgagatcgcaccactgcactccagcctgggcaacagagcgagactctgtctcaaaaaaaaaaaaaaaaaaaaagaaaaaagaaaatgttttttgcagagacagagtctcactatgttgcccaggctggtcttgaattcttggcctcaagcaatcctcctgccttggcctcccaaagcgctgggattaatagctgtgagtcaccgggtcctcccccagttcctctctttttccttgtccctgtgcatggtgaggttttgtgtggccctgagtggtatcaagctaaataacaagcagagagggacgctctaaaagaaaataatatttattctggaataggcattgcaatgggactacgcatgccatagtcaactatgtgcatattcaggggggtgtaaaggaagacaaagatttttaaagaaaaaatgagtcagattccataattgttttaagataattatccttggctacaaggatcaaatggcaaggatggcatcagtactaggttggacagggagttgctgggtagccgtcctaacagatgtatttttttgtgtgtaaggttgcgatggcctttgtgcaagtctgtggtttttgcagtcttttgtgacagtttttgtcatcaggcatgggtgcctgagaaccctccctccatggcctttcaccagctccatttttctgattaaaaaaaaaaatacaagtgactccattttgatgctgacaactttttcaatggcaatgtggaactgtaataaacttttttcaatctttcagtgacactgacatcttcatgtctctactcagccatacaattaaattaaataatgtgtacattttaaaacaatgacagctgtttaatgacagagactgtgaactgggaccctctaggctggccacttttggtgttttatttgggccacaagtttttgaatgctttcaattacctacagaaaatttcaaaagtggaaaatttcctataaaaatctgcctttattgcttctcttgaaaactggaagaaccggccacccaggtcccataacacctacctggctgaatagggtcggccctactttcagcagaaatacctcctgcagttttcaacagccccagctctcctgggcgttgattttcctagttgcttcctttaatgcagacatttgagtttgcagccctagattgacagtgtaggggcactgaattacttagggttcccacatacatcgtttcttacactcattttcttctgcacagcacctttttttcctttaaccactcgcagatgctaactcattcttcaggactcaattccaatgtccagaagcttttctctgaactcatgatggactccgcgtcccattatgtattcccacatcgctccgtacatccatctgtcacatcccttgtcacattaaattcagattaaatgtttgtaggatgcttgagttcttcacaagtctcacgtcacttagcgacggtcgggaactcctcagtggtagtttcgggagccattcattcattttattcatttcatcattctttcaacagtcataacgtaggtgacgacgactgactcatctcttaaaagatgtgtgtgtccctcgacaaataacctgtctgcccctatcgttctgtaggaggacggagtcccagagaactacaactcccatcaagcacttgggggatcgccgcggctgagggagagactatggcttaggaaccaccattcgcgtgaggctctgctccccgcgcctgcgcagagtgcagggccacgtcgcttttgctgtaccggggaccacgcgtctcatccatggcttccgcggactcgcgccgggtggcagatggcggcggtgccgggggcaccttccagccctacctagacaccttgcggcaggagctgcagcagacggacccaacgctgttgtcagtagtggtggcggttcttgcggtgctgctgacgctaggtaaaaggcggccggtggtcatggcgggtttggggcgggcagaggtccgggctttggctgcaccgctgcaggccggggacgcggggctgagagggcgccttgagggcatcaggagggtgagacccacccagtctacaccccaccctctctcctgaagcagcggcagcagctgggcgttaagggggatgccgggcaacccccggagttaacgtcctggtccttggggcgcagattgctcttcgtcatctgccctgttacgcttgagcgcgctgttcctcgccttccgctgttctcactgcaaagactcagggtcttgacaccaactttcagcctcccgtgtttgcgtgcgggcgctgggataccaaggtagtgagatagcacctgagtcccagtcagagtaaggactgcaaagaaaagttgacagttgacagtgcctggctctcagtggatccctaacaacagcaatagtaaccattatgataaaagtcagttccaggtgaatgaggtgtttcgtcacagacttctgtgaatttccccaccccagccatgcacatatactgattcccaaggcgtaatttttgttgtttttctctgtctattccacagtcttctggaagttaatccggagcagaaggagcagtcagagagctgttcttcttgttggcctttgtgattccgggaaaacgttgctctttgtcagggtaaatgatttcattgacacccctgttaagcttaatagaaaattttatagatcccagtattcctgtcatctcacggtttattttgtaaaagaagctgatgctgttaaatttggaagttaattcttgacttacttgggagaacaaaaagactcgtagaaacccataattgagaaatattggtcatttctccttttttttttctgtttgcccttgccagatgctgatatttagtctttatcacattcaaggattttatttaattagtttcattccagaatagcagaaggcatagaagctagtgtcctacagtttataattccttcgttaacaaattcttaggacagtttatcgaagacactttttcacagggtgatccttctttgacatagtgggctagttaggcttctttttactaatatttatttttaatacatttagtatttttaacagtgtattttaatgtggtgaataggagaggttttctgctttttaactcttctttttgagagtataaattatttcccttccattaaagaaatacctccattttttttttttttttttttttgagggagtgtctcactccaatgcccaggctggagtgcagtggcgagatctctgctcattgcagccttgacctctgggactcagatgattctcccacctcagcctccgagtagctgggactacaggcgtgcaacactacgcccggctgattttttatattttttgtagagatgagattttgccatgttgcccaggcttcaaatcatttttgttggttaaaaatctttacagaagcttggcaaatttggccactaactgtcttttgagaataatgttgtttttattccactgaggagtaaaatatgcaattaattagatttttttctacaggtaaaaaaaatcaatatcgtctttttcacctgtcggaagcagcattcatttacttaaccttacacctgggagacttagaataatataactcaatttaggtgtgctattaaaatgttgaatatcacccatcttgttttttttacagttgttaacaggcctttatagagacactcagacgtccattactgacagctgtgctgtatacagagtcaacaataacagggtaagatgtttgtggagttttggagtctgacagtcttactttactgtggtgtgtcagttaaggacatttttaggatgagttcatctgaggatgtaagtaccatttgtagcttatttttatggagaaacatattctttgtgacaaattctcttgacaatctgtacagtagatttaatcatgccctcctctgcattgttgtaccttaatgtacagtaatgttatatcacattttattcttattttttgtttctgtgtcttctttccaactttacaatgagttcttaagagtgggcattaaaccttttaagttttgaataggtaatacatgcacatgggacaaaaattcaaaaggttagaaaagatatttggtgaaaagtaatttttcctttcctttccccactacctagttttctcctcagaagcagtgacttacttttttttgtatgtagtcttccggatgttctgtgcatatacaaacatgtctgtatatcctttattgttgtttttttttaaatgctgttctgcccattatttttctcatacggctgatacaacttgggcttttcttattgtcctacatttgtatacatagtaccatctggttggtttatgagctgcatagtactccactctgttgctataccataaaattaaattcttacttaatctggaccgtgttaatagacatttagttttgttattataacctttgcttttacaaacagtgctgcaatggatatcttacagagtatatatgagtgtatttcaaatataaggaatcatggggcctggcttggtggctcacgcctgtaatcccagcactttgggagaccaaggtaggccgatcacttgaggtcaggagttcaagaccagcctggccaacatgatgaaatcctgtctctactaaaaatacaaaaattagccgggtgtggtggtgggcgcctgtaacccagctactcgggaggctgaggcatgagaatcattttaacccgggaggtggaggtggcagtgagccaagattgcgccactgcactccagcctgggcaatagagcgagactaagtctcaaaaaaaaaaaaaaaatataaggaatcatgggaaagacattttacatacctctgtaacttcagaatgtagacagtgactaccaaaccgattgtaatgcataagtttgtttgtttgtttttgagacaggagtctcactctgttgcccaggctggagtgcagtggcatgatcttggctcactgcaacctctgcctcccgagttgaagcgattctcctgcctcagcctcctgagtagctgggattacaggcgcccaccaccatgcctggctaatttttgtatttttagtagagatggggtttcaccatgttggccaggctggtcttgaactcctgacctcaagtgatccgcccacctcagcttcccaaattgctgggattacaggcgtgagccactgcacccagccatgtaataagtttcggtgagtgagtggagtgagggctcgttggaggatgtggatggatagatggatgaattagaattgtggtttgagaccttttcttcttctctttgtcttctttcccctttctcatgcctccagaattaaagattgtaaagaaaaataaagggacatgtttttaaatatcttagcgatatctttgttttttttttcaatgatgacactctttgtggcccagacctttttaaactcccaaggattcagattttgaaattccaggtttgcaagatcatctagtacctgcactagatttttaacttaggatactccaggatatgctttaaatctgtaccttctaatatgtagccactggccacatgtgactgttgagcacctaaactaggactagtccaaattgaggcatgctgtaagtgtgaagtacacaccagatcttgaagacttagtatggaaaaaaagaacgtaaagtatcattaataatttctttttttattacattttaaaagataatattttggatatattagattaaataacttaaaattaattttaccaatttctttttacttttttattatggttactggaatatttaaaattacatatgtggcttctgttattctatatttctactatatttctattctatcaatatttctactgaatatatagagcatttttcccttccctcttcactctttctcctacccccttacgttttcgatctaatctctttagatagtaatatacctagtaatgtatcttccaaattgcttagggtgtgtggtatagtgctgcttttgaaatggagcagttaagtcccaacctgggatctccagactcttaacagtacttaaaaaaaaaagagagggactaataaaaaacatatttgtctataaagaaatgcacaggctatgtgaaaggtaaggtcataataaacccagctggaattgtgttaaatctgtgcaggatactgattgcctgcttctgaactgtgggtatggttggctgtggataatgtagaacatgtaagaaatgatggtctgctgcatgtaccaggccacatctaagagtcttattgttgagcacagccacgtttacactgaatataaactttattcaccattccaggccttgaccttatattcaggaatggcagcctggcatggtgaatagaacttattagggtgcatcgtagatttgctcagtaggggctcaggaattgacacaaatgctgacggagttggaacaagtaaattatatgtctggaagataaatatttaaataattagattaagggtggaaatgataaaagtgtactttgttataaagattggagatcccagtaagagtaatatgctctatgaaaaattgtaagttcttatattacattattagtttatgagtacttgttactgttttcacatttttgcttatactcatacagtactcctactttgctatactcacactggtttatctcccaagcctcaggtagatcatgcttccctgactcccccagacaggtttttcctgtaccctcaaaacatttatcagtgttctcattttatatttatgtgtaattttacattatgttcacctttctcataaattttgccagatcaggaaccgtgtctttggccactgttacatccccagaacgttgactagtgttttatgagtagaagatgctttgtgaacatttgtttggttaattaggtaccagtttggtagccaatatatgatactaaaggtttatattgtgaacgtggaactgtattgaaacgttaatgttattgctgccatccccagggcaatagtctgaccttgattgaccttcccggccatgagagtttgaggcttcagttcttagagcggtttaagtcttcagccaggtaagaaggaaagaagtgaagtgggcttgtctaggtctgtatctgtatatcaaagccactcatgtgatttgctctggtggtgtttgggaggcagcatggtatcctgtggtagaccttgaggtgaccttggggtcagccagttctgggttgcaagtccaccttcacctggatgatgaggattttatgggattaaaatgcttaaaaagtgttttttagtgtttaggaaatgttaacccttcttgtcattgttactaaatgtttgcatttattctgaaggtgaatttaataatgtatatgactattaaaatctgaaaaaagaattttaaagctgggatgaatcctagcagtttttaaatgccaacatcatttatatatatagtgtttttttgttttttttttttgagatggagtctcactctgttgtcctggctggagtgcagtggtgtgatctcggctcactgcaacctccacctcctgggttcaagtgattctcctgcctcagcctcctgagtagctgggattacaggcacgcaccaccacaccctgctaatttttcataattttagtagagatggggtttcaccatgttggccaggcttgtctcgaactcctgacctcatgatccgctggcctcagcctcccaaagtgctggaattacaggcgtgagccactgcacctggcccatatatattctcaaattacgtaaaattgatgtttcaagaagtacagaacaatatttccatatttcttttagtgtgtgctctggtgttactgactcttaagttcttccctaaaaagtcttatgctgcagtttcagatgcttcttttttggtctctaacattaataagaactgaagaggaaaatcagtatgccacatttcactgatttgaagacacattttaatatctctgaatttagaatatatcttatagttgatggtgtcatagtttaattggcagtattttctcttagcggtccctaaaataatgtctttaattggcagcattttagttttgatggaatgaagtagtagattctttgccttttattgaagatgtctagactgaaatttcattattgcatctttgcccacaagatggtggtgatgaacaatttgtcacagataagaaaattccttggacaattgagacaaatctagagctggtaaattttgccataattgggtttttatttccaattaaatgttttttctttttctattgccagttctaaatattttatgatttgcagtataactactctgtgattcatgtattttgggtaaataaaacatgcaaaatatgaagataaaacttagttcaaataaattataatcatgataacatgcaagttgaaaagacatttactatattggtatgtgacttttttttaatcctactttctggcttcgccaagtttccctagtggctattttccctctcctgatttgaacatatgctgttgctgttcttatcatggttcccctcccccatcttttaaacattgcctatttgattgtctgaatccaataatatcagtttccttttcctgaaccttaaacactttaactttcatcttcctcacatcttccttttatttatgctcctttttaacccccatccatacttttttttcctcttacattcagtgatgagaattaccaggatgcttatggtcttttgctccccattgcttcttgaattttacttcttccctttagattcagttttccctcactgagtatatcttttagaagtgtttccagagagggtgatgagtagtcaaatgttttcagtctttgttcatttgtaactctatttggccagcattttggaatgtctcttttagctgagtgcagagtcctgggtggcagccgcatcactcctgacctcatccatctgttgcagatgagaatgtttttgccagtcagtctaattgtcatttcactgtagtaagtctgcctgatttgaccttctatccagggatagattttcttctgttcaaggatggatttagctttatcattcttggaattcagttgtgctattccaaaccaaagattctcctcagttttggaaaattctcaccatcgtttctccaggtagtgctgtttccccatgatcatttctcacactctggaattcttatgaatgttattgaaccttattatttttgcctttcttgtttcctctctatcgtatcttccagatctttctacttcgcatattgtaagattccctcagatttgttttctagtttattacattattttcagctgagcatgatctctgcttaacttttccattgatttattaatatcatttactatatttgtctaaaatacttaccttttcaaaccagcctgtttctttttatactattctattttttattgtagtttgtagtattttcttaaataattttaaacatttactttatagatagctttattatcttagttttggggtgctgattattctctttggggtaccagttattctccctcataattattttattctgtgccttgtaatttttgctccagaacctttcttcaagagtgacacatcattgatattgtggtggttctttaatcccgtaggatatgaaagccttgctccataagcggttcatagttccttctgttggggccatagggcttcaataagtctggcccaatttttatgtaagcctttccccttgggggtcttacacctggagagagtataaattcataccctatatctgtgtgaggcagtggaggcccgctgtttctaagggaactttttttgcaagccccgacctccctgagactattttaagttgtaggctttgtgcagggcattcagttctagctccccagctgcatgttggccattgcatgtctcttatctccacctgggcattcaaacccttgtccataaggcttgtatttttttttttttttttgagacggagtctcgctctgttgcccaggctggagtgcagtggcgcgatcttggctcgctgcaagctctgcctcccaggtttacgccattctcctgcctcagtcccctgagtagctgggacaacaggcacccgccatcacaccaagctaattttttgtatttttaggagagacagggtttcgccgtgttagccaggatggtctcgatctcctgacctcgtgatccgcccgcctcggcttcccaaagtgctgggattacaggcgtgagccaccgcgcctggccggtttttttgtttttttgttttctttgagatggagtttcgctttgtcacccaggctggagtgcagtggcatgatctcagttcactgcaaccttcgccttctgggttcaagtaactcttctgcctcagactctcaagtagctgggattacaggctcccgccaccatatctggctaattgttatatttttagtagagattgggtttcatcatgttgcccagacttgtctcgaactcctgacctcaagtgatctgcctgtctcggccccccaaagtgctgggattacaggcgtgagccaccgcacccggccccctaagacctgttgtctgcagtttccctgggctgctgcactttagctttgatatctctttgtttctgtcacatgaggagtcccactatggctgccttagttcaggccctacctggtcactgtgcttctagttcaagcgccctctaagattgctttgtcttccatttaggcaccaatattcttcataagacagaaaagcatgaactccacaggtcattgtgtcacgcctcactgtctgacttggttctccttcatttccccatctccctgtgtaccagcttaccttgacttccccagggaatgtgtttcacgtatttgtggcttgaacatactgtaggctgagtatcccttatccaaaatgcttggaaccagaagtgttttggattttagactttggatttttggattggggatactcaacctgtactttccagacagcctgtgccccaatttttggtctagctaagattcaactcaactgttacattctccttaaagttgcctttgacctggtctcatttaaatgatctttctctttattcctgttacacatgtgcatagttttgtcttggcatttatcatatggttctctatatgatgatttgtcttggaggacaggcatcatttcttactgtcttttttcagcttcagtcattgatacacagtagcactcaatagttccttgttaaatgaggatttatgttatatgataacatatgcacagacctgcatgtgtgtctgctgagtgttaatcaccaagattgactttgaagaagttcaggatagtttttcaagataatgatgtcctgttacacgttcacatgccagtttttcttgttttctccctccagggctattgtgtttgttgtggatagtgcagcattccagcgagaggtgaaagatgtggctgagtttctgtatcaagtcctcattgacagtatgggtctgaagaatacaccatcattcttaatagcctgcaataagcaaggtgccatcatgttttcttgcaataataattgagttttttggggattgctgctactaagaattatttccattatttacagttgttattattgaggatgagatacaattgctgtaaagaactataaattgaaggatttttaatcttaaaatttatttctactcctaccttttcaccagtcttctaaccagaagaccaaggaatgataaccaagtgactgctaactgatttttctttgatacagtgttttttctgattataaattattttactttaccaagttaagttcatcagattgacaatatgtgatatcagatgcacagttttgcagggtggagtttctgctttcaaacaagtttactgtacagcacattttatcaagggaagtttgctgaagttgttttcttttaacctgataaccattgaaaacttttctagtaatccccaataaaactgggcttcagttccgttacctgtacaataagacagactagtggatctcttcaggtctcttccagatctgaaattctgattctatgaagagttcaaggcatttctcagaagtgaccagataatattgataatgccttattgggaatgcaattagcgtcattacctgacctctttatttccctgattgaatataaggaagggagttattgtttatttgccatgggctttgtgccaaaccagagcttgtttcttacctttagtacacttaatgctttaaacataccgtcttaggatcaattggaaacatgctaagtttactttaaaatgacagatagggcactgtcttttggcatgtgaaggcacttctcataatcacagcactggtaggttttctttctgttaaactgagtaaacttatatgttttgaattgaaaggtctataaggtgtggagaactttagggaaagctaaagtcagttttagggtcaccagcataatatgtttataagcattatcttgggaaagcccctagtgcaagtataaagcttactttgatagagaaggaactagtgataaaaggtctttttttaaaaaaagagaaaaacttactggtttaaataggaattttccttctgtgtaagaagtcttggggaaaaaactcattctcgtttaaactacaacagtgtctttatttctttacagatattgcaatggcaaaatcagcaaagttaattcaacagcagctggagaaagaactgtaagtgtgaaagaggcctgttggttaattatatatcttaacacttagactgtaagcagcatattcatgtttcttttgtttggttttatgtgattatcacaattatagactgaagattagtgtgataaatatttgttaaataatttacaaaataatggaatcacaaaaacttactagggtgcttatagatattttaaaatttcatggaaagaagatttttttgaaaccataaacttaatttattttaccattgttactaaatcatttatagttgaaaggttttagaagctaaaaaagtttacatgccaacttgagaacggtgttatttcagtgagtggaagtgtttgttcaccactcaataatgcctgtgaagtggtatttaaggatgcatgtaaataataaaaaataaaaactgagaatcaggaaaaaagaaattaaaacatttaaaagccactttggaaattattgttgacagaataagaacagaacactgaggaagactacaagtctttgatactacattatagcttcttagattgttaaaatacttggcaatattatatatcctgctttgagtgtttcaaggtttgtaaattgagctataagcttttgaattttaaggcatctagcatgtcttctgcgttatgccaatttgtaagagctagccaaaagctggtgtagaagaaatgatcaacatttatagtaaagcaagttatgttttcttattgcttttgtgtaaggccttgaaaaggatctgatgaggaaaaactgtataaattcaacttttagaaacttttctccccactatgacttactgactcccttattcatttaagaagcacctgtagtgcatctagtggatgccaagactgcagttgggagcagctgtaggaggaaatgtgttcctgtactcaggagcttagagtctggtagaatctagtcagcttcgggcattggcaaactcctgcctgggcctgcaagccaagagtaaatcgacatttttaaagggcaggtaaaaaacagaagaaaaatatgcgacaaaatatttaatttctggctctttgcagaacaattttgccagccctgcctatgccattttcagtggttcctttcccgtctggagctgcgagtttatcaccctgtcctcctgtgctcttgatgctcactctcttggattgtatctgttgctgccattaggttaataaggacattggaacaattggatggttgggtttttctaaaaattctcttgaaattgttgggaattgttttggggaagccaaaactgtcataatgttatttgtgaatcagtcttgggttatttttaacagtacagtccaagtctcccgtggttaaaacacatgttttccataggctgtttgcttttcactctatagacttagagaaaaacaatacagaagccaatccttttttaaaagcattgaaaggcaatgctttcttaaaaggcagtgaaacaaaatgttgacaaattgtaaaggttaacatcagttaaaattcggaatctgactaattttaatctcagatttatgagaattaggccctgttagcttagaggcatttcatagtctctcaataacacggtatattatatttacatggccttgtggcaaaagctgaatacatgttttacttttttccttaaaaaatttttattgtaaaatatcttacttataatagtatatatgtcacatgcattaagcttaaaaaatattaaaatgaatacctatgtactcaccaccatgcctagaaggcccctgtttctccccaaaagcttttccctcaagaggtcagcaatatccagttttgtattgttttttaaaaatacttttacagtgtgtgtgtgtgtgtgtgtgtgtgtgtgtgtgtgtgttccttcctaaacaaggtattgcttagttttgcctgtggattcttcactaattttgaagcaactttacagaacaagaaatgctttattttgtaagaaagaagattggcagcatgtattcctctgcttctggatagcagaaaggggaaggggaggccgacaaatgagtgttgcttatgcaccctttattagggccagcaggtggcagtaaggggacttacattgggaaggttttggtggttaaagaggttggataatagtaattctgccctagttagatatgagaatctggagttggtggatttctaaactccatatccaaatagactcaagataaaaatacataccctatctacccacacttaactttcagaaacttatgtttttataacacttaaagcatgtattttaaaaatatatttttagacggcttcattcagtagatcctcttagaagggggccttgggctgaaagaaagttggtgtgacctggtctactgctgacctgccttctagccctgtgaggtctgacccccccagcccgccccacctacctcacctctctgtccaagagagggacttataaatgcaaaggattattcaacaatcttaatagcataattggcaattctatagttaagttttaaatgagtgctgaaatgtttagaaactaatatgatttaattgctgtataaaaattttgcctcctgacttctttccttttgccccacagcaacaccttacgagttacccgttctgctgcccccagcacactggacagttccagcactgcccctgctcagctggggaagaaaggcaaagagtttgaattctcacagttgcccctcaaagtggagttcctggagtgcagtgccaagggtggaagaggggacgtgggctctgctgacatccaggacttggagaaatggctggctaaaattgcctgagaggcagctctaaagcacaagacctggatgtgtgacacacagttttggaaaaaggtctgtggtagtctggagttgatgaggaaggggtacaagatgtggttagaaacatttctttgttctggaaacaaagtactgttgaaaccagcttggaattttttttttttttttttttaagttcagttctcccttatggctgcctttcaaacaagtaccttttatctgatgcctgtatcttccctttgttaaggtgtaacttgatgtagggtcaaggtttttgtgacaacaggcagactccacacagagaggatatgatgagaatatggccatcacctgaaaagttttcttatcttctgtgcttttggtccctggaaacaaatccgcctatgtatgaagctagttgatttccagttgcactatttccagttgcctctgaagttcacaggcaatacattgtctagtcctttgcgaatttctctgatttgtgggcacagttatgaagtttccccacatgtgaagacaggtacaaaatagcagagccaagcagacagtgggtctattcttcattagctcagtgacttgtccacactcgtcttagcacttacgtttcaaaagcttgtcacaaacccttggagtcattcccagataatagaactggaaatgataaatcccctaatgccaagggtctagtgtgttcttagtggttatactgggaagtgtgtggagatttaggtgctgctctgctgctctggatggctgaaggctcctgggccatcttcatgtgctgcttgaagagctcctattttgtactcctggctagaatgctgtggaacaaatacaaagtgaaaaaagttctctgtagatttctgaagtgcatattcattgatgccaagaaaaaaaaaaagttgcctttttgaagtgatgttttttgctgtcttcttaaacacaaggcttttttgaatgattagtatatttcatggtaaagaaaacagcctgtctggctcaaagcaattaaatagaatgtaatggtgagtacaaatgagtgcacatgtcaggactcaggtctaactccttgtctcctgagcctaaagattgcaacatacacaagaacacactcctattcctaccccacacactcagggacaagcccaactaaagcttacaaggagaccagggtggctctgtccaggggagaagccagttatggaacagtgcattgagagccatggtaggagaggcccacagttctctggagcatgcagcaggggcaccccacctggccttgaggatcagggggagtcaaaggataaagcatggggctgatgacgtctgagggagtgtgatcctccatgtatggcctctgcctgctgtctcacatgtcccttctggtggtcacttgggctctaggagtatacgtcacctcagaccatctggcagaaatactccaggctcctaccccaaagcacatgtcagccttgctgctggagcacgaagacaatgtaaatgaaacatgaaatggaggagttgtgagaccctgaccctgagtccttacttgaaagctgctgctggtgttctgagtgtcttttggactcttatttcttgcccttttccttattaggcaagcagtaacttaggaagtaggtaagagcaataaatgtgacatgttatgtcatcatagtaggagctcatgggaataaaagtcagtggcttgatgcttctgttagaggcatgtgtccctctcagcctcttttatttttttctggttaatatcttactttattggaggaagcagcacaccagaaaaagtgactgaagaagggctgcaagtttgagtttgattcaaggcctaaagaaggtcttccaaaaaaggataattctatctggaacactggtctcaaatgttagtgggcatcagaattacctgcgatgcttgttaaactgatttgaggaccctactctcagacaatttgattcaatagcaagtctggtattgcctcaggaatctgcatgcttaataagtcttttgtcagtcgcatggcacccctagagatgatctggcctggagtgtcacgtgtgcctttactttgtttttaaagtctcttggggcacacaccctgctgagtttttctgacagggtcaagtcagcaggcatgggaactctgaccttgcttcttactcctgtactagtagcaggcattccgttcttgtggctttgggccaggatgaggtcatggtgactagtctttgggaactgggaagggttttgatgggaggtcaaatgtgctctctccactcaggtggtgcccttttgtggccctgagggcatttgactaaagtaggcccatttcatgagatgggcaggtgtggccagagtagaaggatggatgtcaggtcttggagacgggccaactaggcacgactgtatgacatagatgagacttttgagcttgaaacaccttgggaacatggcagtgtatggacaccgagacctcctaggacagcagctgcctaatgcaaatgaccctgttccctgctaaggctgcagtgagatgccctcatggaggggcagctgtgatgagtgagccccaggcactctgttggtgaatatgtccacttctggaatggaatctccctagtgggtatggacacgggcagacccagaggggtctaagcactgcactgtttcttcctttggctcctctccagtccgggccttggtagcctctccactaccaggtgcctgacagtctactgggggttcctaatcaacagcagctgctgttggtggggagtccctggggtctgtcacttcttcccactgcctctgtctcagtgcctcctgggctgtcagtgttcccctgtggtcctgccttgtatgaagcgctggccatgctctgttgacttagatcatttcagccagtctatgttttttcttgtttttgaagttttgggttcagcacaattgtcaaagcttcagttggctcatgcctgtcctcacctgaaggccatcagtggcaattaagatgcctatctctttatctcatcccttcacacatttaaggaaaggtgatcacccacctaccttcatttaaatgcgcaggaaaacaatcccacttcccttcaactgtaaacctcgagaaacttgactgctcacaagagccttgtacgcatttatccattgggtaaaggccacgccttgcagcagaccatggaaatactaaacaaaacgcaattcctgctttagaggctagtagccccattctgaggttaagaaacgtgccctttcagtgtggtttccctgctctctcagtagtgtgagctccatcactgctgcacttgactcctaagcgctgtgtgggcttgtggtcagctgccagccatgcagccccaacgggactgccacttttccactggcctctgaagtgccagtgttcccatgatgctgatgtgtgaggcacatggccatgttctgttgacttgaatatattgtttcaagggtttttttgttttgtcgagacagagtctcactctgtcgcccaggctggagtggcagtggtgccgtctcggctcactgcaacctctgcctcccgggttcaagtgattcttctgccttagcctccccaagtagctgggattacaggcctgtgggaccactcctggctaatttttagtagagatgaggtttcaccatgttggccagtctgttctcaaactcctggcctcaatgtctcttctaatcaaagatggcttccttgaggtggcagcagattggagggtgttctggaacctttataagctttaaaaggaaaggtaattagtgaagttggacttgaagaagagtgagattcccgggcaagggcaatttacctaatcttggcctttgttcctctttggattggtcccaggactgtgctggctttctgagcatcttttagtctggagataactgagacctggaggggccactcagggatgttcctaactggtgtggtgtggggctggggatggaatatggcagctagatgttgtcaaaggtcattatagttcaccttaagttcttgcctttaaatggctttctgaaaatcaccagaagcatgagagatccagtccctgtaccctctccccccttcctaatcccctagccatggcaagcagagtggggatgaaggaatatatcgtacccctgactcagttctgcctggaggctcccttcccatcagcctttcagcagaatggagattaggggaatgcgtgtggatttactctcatgagtgtgtcccatctttaccccttcggagttggtggacagcccaactccaccagtaggaggaagaagcaaagcagcaaagggctttaggtagtggacataccacccaggcatgacaaaagggactctgtggagcacacacttcaggaactgtttttgaacccccccatttatgactgcaccacttaaacacagacaagaagctttgttttgagaattaggacagtttattgtttgaccaacatgctgagtcttttccacattttacacagtttaatgtgaaatcaacatggcggctatgtcttctgagcccataacagatggaattgccaccctctgtgctcctcacagccaatcactttaaagggatgggtgaggggaaagtgaggggagaagtggacacacaccgcgagatgcaggctggccttcaatgctatggaggcttcccacctcctgaaggaaccatctaaacccctgctgcaaggatttcctgatgaaaccacacactgctgggagtgccaaccagacaggggtctggagtccaaggagtttgcacattgagatcccaaggttttggaacacctaaatagttcatgtcaaacaaaaattcaaagggtgtcctgatctgtgtgggtgcccatgacaatcaatcagagtagacttggggactggcccttgtgcagtagaggagcccaaaataccaccaatattctcactcatatgctgggaagaacctagtgtcctaaccaaaaagagtagagatggtctgaggaacacacccacacacagcagtccttgctgtgtaataaatatggagtcacatttgttcacacacagggcagcaatggatgaaaaatggaaacttcactggttctgatcactcctaacttgctgggtgatcttaataagcaagttgcccttctccatcctggttttcctgcctgtagacaggaaaagttgtgacagctctgcttcacatagctgtaacaaggtgacaatgcctcacattctttggggagaggcagttcggaaacgagtgtgcgcacaatctgctcggttgatgcacacagacatccttctgttcagctgcccctcaagtggctcagacatgcctcactgtcctcggctacctggtcccatctcatcctgacatcctcacctgccttccatcttgtgaaggaatgaggctgctctacctgcaggatgctgaagccaggagggccatccctttattgtcacaactggtatcccagggcagggcctccccgcactggctagccaccaggatgatgcagacgttgcaccccagatgtgtctgcactcttaactaccaccatttcaatccttgtttctgttgccagagatactgaaactggtctggccattgctcccctcagacctgggaacatgactgaatgtttaaggatgacaagaagagagcagcgatagatagcaaggaggcctctgaccaagggaaactgctgccaacagctaccaagccaactagccttggatcacacaactgcagccatggtgctcatgattctgatgtcacaccttcatgttgatgtatgtatgatcacccagcaagttaggagtgatcagaaccaatgtgtttccacttgtaaataggctgtttgctttttccatcttacactcaactttcctgatgcctgcagaacaggagctttgttgataagcttttaagattcacccccttcactcccaccatccccaaaaaagaaggccaagaggatcctgctaatctgccaggtcacgtctagtctttggggagagggactgaattgctcaattgagaacatttcctcaaaggaatcctccaatttgccctctgctaacccatctggattcagcaaagatgcaatgctcttgctggggtgctgaggcaatgccatgacatcttcttcaagagcacctaacagtttattatggaaccttaactctgtgccaattctacctgcaagcaaggggacagggatggtgcctgctcaagacaaaaatcagggaaccaacaacttctgaaaaagaggtctggctgcctttccacaccccaggaagggaggggcggaaaccgcacgtgccgaagggagcgccatggaaccactgagatgggaggatgggaggaagccaccctcagcctcagaggccaaggggctggggagaacccaaactcaaagagaggatgttgtgtgcatgctaggaaaggcaggactcactaaggccatgtcaaaccaaatgctatcttttactgctcctctaggccaggatggaaacacagtccacggtgccttggatgtgtgtgcccctgagaagggaactgagtttctactgttttatgggatgtttttttaaaaaagctaatctttagtgccaagaaaataaaaatctaccatacgttcattcactgagacccagtgcagattcctgtaaatggggcggtctcagaggccacaggtgatggcccccgctgccaaccaggcaggacactgtcatgtggactcctgtaaattctctcgaggtaagtaagcactcttccaacaagcaccacttgggggtgtgcccatggtggggggacactggcccacacaggcatgcacacccgtgcatataaagtacatagagaaatggtggagatattcccgtgggctatgtttgcctgtagtttaacacaactatgcattattttattgatggcaagacaatcacaagttatttgacaatattaagtatttcttatttcaacacgttgcagtacttttgaatttccaaaacttatcacaatgcaagttccaacttgagagcaggagaaacaagaatatacattgagcacatgtatctccgtgaggatgtgtttgtggaaggtgtatacacaagtctatctctatatataattatgtacacacatataaaaactaaacacatgacatctgaaacacgttcaaacattggtccttgccttctgcaagaggtgctcagtgggatcctgcttcctctcttcttcacctgaagataaattccttgctagagatgagctctggcatacagcctcctaggcagag

SEQ ID NO: 309 - DNA, 50559 bp, Homo sapiens
aagtgtctaatcgatttgctcaagggtaaagagaaattggtggagaaagaattcaaacctaggctgggcacggtggctcatgcctgtaatcctagcactttgggaggctgaggcaggaggatcacttgaggtcaggagttcgagaccagcatggtcaacacggtgaaaccctgtctctactaaaaatacaaaaattagcccggcgtggtgggggcccctataatcccagctacttgggaggccaaggcagaagaatcagttgaaccgggaggtggagtttgcagtgagccaagatggtgccactgcactccaatctgggcaacagaacaagactaatcaagaaagaaaagaaaacaaaagaaaaaaagagaagagaaaagaagaaagagagagggagggagagagggagggagacggggaaggaaaggagggagggagggaggaaggagggaaagaaagagagaaagaaagaaagaaaagaaaaaagaaagaaagagaaagcgagaaagaaagaaagaaaaattcatatctagaactctgactccagagcctgaaatcctaactgcatgggattgtgctgtccagtatgatagctaccagtcatacttggctatttgagcacctgaaatgtggctactccaaactgagatgtgtgtaagtgtaagatacacacaggattttgaaaactgtttttttaagtaaaatatccaagttttaaaattacatgttgaaataatagttggaatatatttataagattaaaattaacttcacctgtttctttctatgctttttaatgtggctcctagaaaattaaaaattacatatatgtggttcgtatgctgcttcaaaaagtagaggctgttcatggttttctttcttagggctgtcaaggtcaaggcgcttcctgttatttctctattcaagggtagaaaacatcaccagggtacgttgttttattgggcattggtttatttctagggggtggaaacgggattcttcccctaggtccccagctgtttgtagtcatattcttttactcacacacaattttattgcttttgcttttgggagatgtgttttattaaaaatagtggctaatcagggacttgttaacggcatacactagaaggttttttgtctgttttttgtttttttgagacggagtttcactctggttgcccaggctggagtgcaatggtgcaatctcggctcacctcaacctccgcctcctgggttcaagcgattctcctgcctcagcctcccgggtagctgggattacagacatgcgccaccacgcctggctaattttgtatttttagtaaagacagagtttctccatgttggtcaggctggtctcgaactcccgacctcaggcgatccgcccgccttggcctctcaaaccgctgggattacaggcatgagctaccgcactctgccttgtttttttttttttttttttttaacaaaacgatcaaacaaactgaccatggaaagtcagtcctgggttccagttttcaactaactgcattttcttgcagagtgagcccgcaccatcacagtgcctgtattctgtattctgtcagacccaggctacacacggatcctgtaatgcataaaacaacttaaaaaagtctcaagaggctacaaagatcttttaaatacgttaaaagctctaaacgattagaactgcctaagataatgtttctcttcctgaaacctgctttgctttaaactcaaaacattccttcagtccttgagcattaccttattgattctgaaaagggaggaagtcttcatgagtaggagtgtgcttctttatcattattatatactatgtccactacctcgaaatggagtggttcattttatttgtatggtttggtagctagcgaccctggttctatactggaatcgcctagagatactttgaaaaacacatatgcttgagccttgcccttagaaattctgatttagtgaatacaaagtataactcagccaactgagaacatacgacgtgcggtcggggttgagaactatttatgaggatagcgaaactagtgttttaggccctgtaaaatttactttaaaaaaaaatcagttcatacccaggtacttcccctccgcatctctgttcaaacctttttaatgaaatcccactggcttagacactctccctatgaaaccgcctttgcaaaaatcataactgagaaattacagtgaaagaggtctgacctaaccgatactacctttcttctaacattcaagctgtccattcctaggtgtaggccaaactaactttgggaggaacttagtttatagtttagcttggaaacaaagaatataacggtgctttcccccaaacaaacccccttcctgcctggggactagactgcctttgcaggactaacaaattagctacaagattagaagttatggtttagcagtcatgaaactggaggctgcaagattgtaaacctccccaaatggctcctgggaataaaatcactattgtaaaacctaagatcagtgcttgagatattttgcagaccctgcactcaatgcatcagctggcaccacccagatcaataaacaggctcatctagtcttgtggcctccacccagaaagtgactcagtgcaagaggacagttttgactccttacgatttcatctctgacccgaccaattatcactcctgactcagtggtcccctacccaccaaattatccttaaaaacaccaatcctcgagttttcggggagattgatttgagtaataataaaactctggtctcccacacagccgggtctgcatgaattactctttctctattgcgattcccctgtcttgataaatcagcctgtctaggcagtgagcaaggtgaacccgttgggtggttgcacccccaccaaactcctattaaggttactgttagcatcactcattagtctgatgtttatgtacaatgtgtgtgtgtgttgcttgtcttaccaactggtctataattctttatggagaggagtagtatctttatatttaccatgcaccatcctagcgcagtacatttcacataataggtactcaataaaggatgtttcaaaagtacatatgtagtttggatattcacgagacatttataaatgcaaaaataaagcaatgtatataattcataatgagaccattagcttatattagcaatgggatagactaaaatatgggttaaaacacaattatttaatatggtagacataagaatttaggaaacttatagatttcaaagtgttgtttaggaaatagtccaaatcaaaaacagtcttgggaaatgcaacagcatggggaatgtcatctaggctttatgggaatctttccacagtatctctgactactggcatccagaatcatagatgtatacttacctggcaggggagataccatgatcacaggatcattaatgattccagtggtgagaaatcagtacctggcagtagaaatcggcactttattgtgggaaagcctgaatggttaggaaccatgtgggatatgaagtcaaatctgccaccccaaaccttcaaactttggtttcaggttgtgctcttaggatcatcacaaaacagattgaatctctcccctcataacagtcccattaaatgaggtaaagtcaactatacttgcgagtcttactccatgaactcatgcaagaaacataattttactcaagggatgatttttaaatcaccaaaatcacacaggattctctttcctaacccactccagcacaaaggcactacctcccaataccatcccattgggggttagggcttcggcatgtaaatctggggagaaaacaaatatgcagtccataatactaggttcataatgtgctgtaacccttattcccttagcctctatccccattccactgtattatttcaaaacagaccttacttcccatgggacaattagagcctgaagaagagatctcttctgatgcatcatcatttttcctggcagcacaaatattctgctcttcctgctaatactaattgagcacttactatttccctggcttttttttttttttttttcggtagagatgagatctcactatgttgcccaggctggcctcaaactcctgggctccagtaatcctcccaccttggcatcccaaagtgctgggattacaaagtgagccactgtgcctggtgaggtttcgttttaaactctttttttttttttttttgagacggagtttcgctcttgttgcccaggctggagtgcagtggcccgatctcggctcaccgcaatctccgcctcccgggttcaagcaattatcctgcctcagcctcccgagtagctgggatcacaggcatgcaccaccacacccgcctaattttgtatttttagtagagacgaggtttctccatgttgaggctggtctcgaactcctgacctcaggtgatccgcccgcctcagcctcccaaagtgctgggattacaggtgtgagccactgcgcccggctgttttaaactctttacatttaccaagccctttaatcgtgcaggtattattattattcacattatacggacaagaaaactgacacgtaatttacccaaggtcacacagctagtgagtaactggtagggaatattccaacctaagcattcttaatactagaatacagtgccttagttactcaacacttaaactgtaccaccttaaagacaataacaagaagtgtgtgaaaatgtggaaaggctttgatgatgctggatgcgttataaacagaaaggcttttaaaataaactttttattcaattatgacacacatactgaaaagtgcataaacgatgttcagtgaattttcataaagtgaacccacatcaaggaacagaaaacggagccaggcgttgtggctcaggcctgtaaacccagcactttggcaggaggataacttgaagccaggagttggagaccagcctgagcaacagagcgaaatcctgtctcaaaggaaaaaaaaaaaacaaacaaaaaacaaaaacaataaccagaccacccatccccatttagaatttctttttgtgctaagtttcaaaattcaaaataagcattcacttgttttctacaaactgcattctatagtcgatctcaaaccttgattgagatacatttccattatagtatactctttctagagcactgatctcaaaatgtggtgcccagccaagtagcgttggactttcaaattcaaggatcccaagctagaccagcagaacaggaattctgggagtggagcccggcaatttgtgttttagcaagcccccaggctgattctgatgcatcttaaggttggagaagcatggatattgtcagttgtaatagttgttgttcgtgatcacgtagtaactgttagatgaaaactagggtttaaaagtgttacgcttgtctaatagtgacaagttctcattacccatctctttctgaaataggctgcaggcaaatgcgttttcattttaaataaccgtgttgttgttccagtcaaggttgcattttacaaggaataaggaagataaagctgcctcctcctatcctaatctcgctcctcgctcagtatggagtcgtccggtttacctacaaagccctgccctagactggcggcaaattcaacgcccagaggcaggaacaggtgtcggccaatcagaagccggaacaggtgtcggccaatcagaagccaggcttgaaccgctcgcccatgtcccgccggcggaagagactctccgcggccacgccccgagccctcgaatgcgagccaatcgttgctcggcgcctgaaggggcagtacccaagcgagccatttaacatggcggaggatgtttcctcagcggccccgagcccgcggggctgtgcggatggtagggatgccgaccctactgaggagcagatggcagaaacagagagaaacgacgaggagcagttcgaatgccaggaactgctcgagtgccaggtgcaggtgggggcccccgaggaggaggaggaggaggaggaggacgcgggcctggtggccgaggccgaggccgtggctgccggctggatgctcgatttcctctgcctctctctttgccgagctttccgcgacggccgctccgaggacttccgcaggacccgcaacagcgcagagggtgagtgcagaccgcgtccgggccgggactacgcggggggcggatgcgggctccgtggtgcgcggcagagggctggttccctacgtcgccgagggaggggctgctgcggccgattagctgggagtccgaggctccgggctgaactttgttcgaatcccggttcgcccgttgtcagcacctgagtttttctcagattgatttcctcttcgataaaatgaaaataagaccctgtttaggtttgatgcaagcattaaatgagttaaaatgtatacagttccactcaacccagtacctttgtctcttttggcgctttctactcaggtattcctgtagtaatattcagcagtccctgtggcctccagtaacccccgaggcatcagtgttttatgttaatttgtgagctattaaatctcatttggcctgctggctctacagcagttacttttattctgtgtagtctcagaataaaagtaaatgttggccacatgcctgcaagtcccagctacttgggagcctgaggtgggaggatcgcttgaacccaagaggcagaggttgcagtgagtcgagatcgtgccactacagtcctgcctgggtaacagagtgataccctgtatgaataaataaatgaatgaatgaaactgttcatgaaatctgctgcaccccgcccccgtcccaagatggggtctcactgtcacccaggctggagagtgtagtggcgccatcacagctcactgcaggctcgacctcctcaggctcaggtatcctcccgcttcagcttctggagtagctgggtctgcaggcgtgcaccaccacccgcagctgtaagattacaggtatgagccaccgcgcctggcctagtgtagctttttgaaaaacaacagaaagatgttctggtacttcattcatagttggcgctaaaattactgtgcaagtatatatttataatactataattatgctatttaatagaattcttagacattttgacacatttcatcttcaccataatcctgtgagttaggcaaataatcttagttttaaggtactgataggttaaaagggagtgtttcagccccatcctttatcttccagttcaaggatctttcctctgtattgcggttaacactggagccagggataattaacattaagtagaaaattaaatcctggaatgaagctagttcctcagaattctcttagagttctcttagagttggagacatcagtatgaactgtttagctcatgtaggtatagatgacttagaaatatttgcatatgcatgtgtagacataggttactatacaaatatgtatttccttactctgtcagataaaagggcacagaagcaacctaactctagtaacaatgagtacacctagcaccccgatcttgtttacaactaagtttagtttaaagacctcacttggctttattgtgattctggattcaggtaatactttattccataaaataagtgctcaatgaattgagcagttgggggttggctttatagacagtaaggacttaaggaagctgaaacagaacaaaaagaagattggttatttcacagttacttgtaaggctgggacagggagacagaacaatagatacatgggatgcagaatggatgttgtgttatcaggcatgaaagcaacagtaatttccttgtatgtacgtctccctcagagctcttgagtggttaggcgcattatcaatgagcaatggtattttgaaaggaatcttttttccaagcagtagatctcaataatgggcttaaaatattcagtaaaccatggtgtaaacagaggcactgtcatcttgttccatttctagagcacaggcaaagttgatatatcatttgaagggccttaagattttcagaatgagaaatgggcaatgggtttaacttaaagtcaccagcagcattagtccctaaggagagtcagcctgtcctttgaaatattaaagttaggcattgacttctctctggctatgaaagttctctatgacatcttcttctaatatgaggctgtttcatctacaatgaaaatctgttgttggctggatacagtggctcacacctgtaatcccagccctttggaaggccaaggcagttggatcacttgaggtcaggagtttgagacaccagcctggccaacatggcgaaaccccatctctactaaaaatacaaaaattagctgggcattgtggcacacatctgtaatcccagctactcaggaggctgaggcacgagaatcaatcacttgagcctgggaggtggaggctgcagtgagctgaggtcacaccactgcccttcaacctgggtgacacggcgagactctgtctcacaaaaaaacaaaatcagttgtttagtgtaaccaccttcatttgtgattgtagctagatcttctcaataacttgtagcttttacttcagcacttgctgcttcaccttgcacttctatgtcacagagatggcttcttttcttaaacctcatgaaccaacaacctctgctagcttccaacttttcttttgcaattttcttacctctgtcagccttcttagacttgctctggattaggctgtggcttaaaggaatgttgtggctggtttgatttttttttttctatccaagtcaaactttctccatatgagcaataggctcttttactttcttatcatttatgtgttcagtggattagaacttttaatttcctttgagaacttttcctttgtattaacaacttggctgttagacacaagaggcctatgtttcagcctatcatggcatttgacatcctttcctcactaagcttaatcatttctagcttttgatttaaagtgaatgacttgcaactcttcctttcactgaaacacttggagggcatgtagagttactcattggcctaatttcaatcttgttgtgtttcaggagataaggaggcctgaagagagggagtaaggggaagggctggtcagtggagcagttagaacacacacaatatttatggaataagtttgtgtcttatgggcatgatttgtggtactccagaacctttacaatagtaacatcagagattattgatcacagaccaccatacagatataataataatgaaaaagtttgaaatattgcaagaattatcaaaatgtgacaggtacaggtactgttagaaaaatgagccagacgcggtggctcatgcctgtaatcccagcactttgggaggctgaggcgggcagatcacgaggtcaggagatcgagaccatcctggctaacatggtgaaaccccgtctctactaaaaaaatacaaaaaaaattagccagccttggtggtgggcgcctgtagtcccagctatgcgggaggctgaggcagaagaatggcatgaacctgggaggcggagcttgcagtgagtggagatgcaccattgcactccagcctgggcgacagagcgtgactctgtctcaaaaaaaaaaaaaggtgccgttagacttggctcaagctgggctgcggtaaactttcaatttgtaaaaaacatgcaatctgcaaagcacaataaaatgaggtatgtctgcacctatccttcgtggtactcattaaaattttaattagttacttacataactttttgtttaattgtgtcttctcagattaaaaccttcatgggggcagagactggctatctgaagtcatcacctcctaacacaggctggcagtagatgttcagtaaatattgaatggcttgtgtttaaattctatataaattttgtgctctcttaaaatcctgttaaattctattatgactgtgtatggtccagataatctctggtgtagcataagattatgttagaattgagggaggaaattgggtaaaaatatattcgtcttatatgcttaattgctacagaattgcttttcagtttgctagttatttaagttttttatatatacaccaaccaagccctgggttaggtataatggtagtagtggcaccttcaggtcttaggttagacattatttcctcagagaagccttccctgacacctcctctgtgcagaagatacttaaacacacagatttcttgttatatgcttccaaagcattctgtacttgtctttttaaagttttcacaacatttttacttcagtagttcaatcgcttgtctcattgctacatggtaaaaagctcactgtggtccaggagtatggcttacttggtattgtatgtaatcactgcctgactcaacatctgggtgggcattcaagtttggggaggttaatattaataggttttaaactttgtaagctaaacagactcacttaactgaaacctagatagaaataatataaaatattttctattatatgaaatgtttctaggtataagtttccaaccaatgattttacacattttacaatttgtatctaaatcttttttgttaatgtagactgctacttgtgaaagaattttcaacaatttttattctacatgtgaaagttatattttgtaagaaatgtcttcattgctattctttttttttgttctgaattttaatcagatcttaaatgtacaactctaaatttatgataatttttacaatatgtttgtagcctattactcaacaaaccacacagtggcactactggatcaagtttgattttaataaaatttactttttttcttttttagctattattcatggactatccagtctaacagcttgccagttgagaacgatatacatatgtcagtttttgacaagaattgcagcaggaaaaacccttggtaaatatgtttttttattttatattggaaatatttcaatctgtttctaatgtaagacaatgggaagaaacagacgtttttgggggaagtttgcctacaagtgtctggtgcataggggtgtgggggggtggtgtgtgtgtgtgtgtacacatacagtcatatctaaagcaagtaaaagaaatgtagtccctgtcatcttagaacattggttctcaaactttagcctgctccagaattacttaaagggcttattaaaaaaaaaaaaacatagtgctgagtctccctaactctcatgagtttcagattcagtaggatgggtatggggctctgaaatatacatttctaataaattcccaggtgattctgatgctactcttggggaagtgtgtttcattgactctatttgctaactttgtggtgactccaatcatacacactctgtttttactggcaactattatatttgaaaccttttatttgaacttgatgccagcgcttacgtaagaagtacagtttatagctgtaatctctctcccttgtctctgtagttccattttagattgtaatgggcaaggctgattcagtttatcagtaatggctggtatttacaacatggtcattttaaaaggctatttgatggaaataattttgtatttagattggtttttataatttacaaaatacttttccaacaatcctgagtagtgggcagtacttacataaaactgcttgcttattgaagtgttgtcttacataaaatcccagtgtattagcaccactgtcaaggccttcactaaagtatctctggctgatgtagtctgctttgtttggggggtgagggtaggtctggagttggtgccaggaccataaatggatagaactagatagaggcagaatagttgtgaaagagacagagccataggtaggcctgggccagttgctggagaagtagcaggctggagcagaattccagaccatgcagactataagttgacactgttgttaacagggttgttttctacattaaggtggaaaagtattctaaagtgcctggcagtgctttacacatagcagttgttcagcacatcttagttgcttcctggataaccttttctccaaaaaaggcaggggggaatccagattttatgtgtgatctcatggtttaatcttggaatttaccaggatactcttttggatatatcctagatataataggccagggtcagctgtcaagaatcaatgtatttcaccataatgcactaaactgaggcagcatttaaaattttatgtattggatttttggctatacataacccttttgcttttttttttttttttttaattttgctctatagtggcactgcctaatagagatatgtgagccacatgtctaatttaaaattttctaatagctatgttaagaaaagtaggccaggcatagtgactcacacctgtaatcccagtactttgggaggcctagacaggaggatcgcttgagcctaagaatttgacaccagcctaggcaacatagcgagaccctgtctctacaaaaaatttaaaaaattggctgggcgtggtgattcacgcctgtaatcccagcactttgggaggccgaggtgagcggatcacgaggccaggcaataaagaccatccttgctaacgtggtgaaaccccgtctctactaaaaatacaaaaaaaaataaaaataaaaagttaaccacgtgtggtcctctggagactgaggtaggatcgtttgagcccaggaggttgaggctgtggttagctgtgattgtgccacttcacttcagcctgagtgacagaatgaaatcctgtcatgaaatttagaaattcccattccagcaggtgtagctaaaaaataataatgataattaaaataggtggaattaattttgataatcttatttaactcaatatttctcaaacactatgtcaacaagtagtcagtgtaaaaaatgttagtaaggccaggcacatggctcacacctgtaatcccagctctgggaggctgaggtgggtggatcacttgagcccacgagtttaaggctgcagtgagctatgatcacaccactgcaccccaacctgggcagcacagcaaggcccccatctcttaaaaaaaatcaaatgagatattttacctttttttggagtaagtctttgaaatctcatgtgtactttatacttaaggtgcatctcaattcaaactagccatattttagctgtgcagtaatcatgtatggctagtagctgtgcagtaatcatgtatggctagtagctaccatattgggtttagtctcctaccccacataggtttgacaagattggacatgtttggggtgatgtggctgtagacccccacgtagctctgaaatacagcagatatcttaaaggggaaatgcttgtcatcctcctcttatggaactttaagcttttttttttttttttagccagggtgtctctctggcccaggctggaatgcagtggtgccatcatagtttattgcagactcaaactcttgagctcaagtgatcctcctgcctcagcctcctgagtagctaggactacaggtgcaccatcaggcccagttaattttttaattttttgtagagacgaggtctcatgttgtccaggctggtcttgaactccttgccttaagtgatcctcccgcctaggcctcccaaaactctgggagacttaatgtgcctttccactgcagcctattgcattgccgtggaactcagcacatgtcctgtggagaaaagccaatcatgtttgcagtttctctagtttccagtcgacgtgccagccccaaggaaaccaccagaagctgttcttatttgtctttctccagtaaagtctctctggctggagtgcactggatcctcagccttatccaaaatcagcaaatcggcagctcacctcagaagggattctctctggaattttagttcatctcattttcattgcttccatggctatcccatgtctttagcaatgtgattttggagtttatctaactgttttctagctgtagtgtgagtgttttgtttgctgcagtatactacatcccacctggaagtgaatgtctatactgtaaattttttgaagctaagatctaacatacatttttctctatgtcacatttataagaaggaaggcagataagtgagaagggttaagtaatgtcagtcaagaaatacttatttgaaaatgtgtgttgaaattagctcttgaaagaaagcaagcagatgaaaaatgaggaagaaaaattaggcagtctacctttgcattttcatttcactacttttgaggcacagtaagtgatatttaagtgtcttggtgtctgcttgtactacttgcttggtgtgtgacctctctagctctcagatcttactgtataaaacaagtgccacagtgcctgacactcagtgttagttactagcatgaatatcttttgtacacctctttcttaccttatgctgctccattttcctgaagtgttctccttcccatccttgtagtctacacttagttatcatctgtttatccttaatgccccaatttggatgacttctgtttcatgagggattcacttctgctattcctacttagagttaataccatgttcctcaaatacactagactctgcttgagaatttaatctctgggagatgggtataggcatcaatattttttttcttttttttttttttgagacagagtctcactctgtcaccaggctggagtacagtgacgccatcttggctcactgcaacctccgcctcccgggttcaagcgattcttctgcctcagcctcatgagtagctgggactacaggcgtgcgccaccatgcctgactaatttttctattattagtagagacagggtttcaccatgttggccaggatggtctcaatttcttgattggcggatctcgtgatccgcctgccttggcctcccaaagtgctgggattacaggcgtgagccaccgcgcctggccatgcatcaatatttttcaaaagctcttcagatgtttctgaggtatagcaaacattgagaaccattggcataatgcacaattccattaaagtaccagttatattggtttgtctgcatgtcttcttccatagctaggatgtgagttccacaaggtcaggaactttttttttcatgtttgtatcttaagtacctgacacagaacctggaatataaagagacttagtatgtgaatgaatatatttttatatctaaaatgttggaaaaacaatttggagaggacaacaggaaataaagtaaaaatatttgaaactacgaatatttaaactgcatgctcactctggtttttcaaggaaaaaaggatgtgctatttaaaattctctttattcggtcgggcttggtggctcacgcctgtaatcccagcactttgggaggctgaggcgggtggatcacctgaggtcaggagttcgagaccagcctggccaacatggcaaaaccccgtctctactaaaagtacaaaaattagcctggcgtggtggtgggcacctgtaatcccagctacttgggagactgaaacagcagaatcgcttgaacccagggggcggaggttgcagtaagccgagatcgcgtcacttcactccagcctggtcaaaagagcaaagcactgcctcaaaaaataaataagtaaaaataaaaataaaaaattctctttattatgcttatttgttgcatacttgctatggaactacaactgtgctaggaattacagggatttagaaaaatacacttaagtggcttctgccccccaaaatttgaaatatgcattatagagtaagaagttttttgtcttcaagacactgtaaaagctaatagggttgttgaggtaagtataaagtactgcaaggcattaaaaaatgaataatgatacaagagtttctttttaattaatgcagtgctcatgaatttttgtgtcatccttctcgaggggccatgctaatctctgcattcttccaatttttatatatttgctgccaaagcaagcacatacaggagatttagagaaaggacatttcctagtctcttagctgctggggtaaggacagcattcaagaaagaggtgctgtttgcactatgcctgtaagaattgctagattttgtcagaaagaaagtataaaaatggtagtctatccacatcctcagatgtggtgtgggggtggggggaaggtagtctagataaaatgaaaacattagcattattttgaaaataaactatagtttacctggataatagactcttgatttccatatacaacttcataaacttggtcctcacccaggcttcctatgatagtaaatgttagcaccatttatccaattattaaaacccaagagtcctccattttttcctcatgctctacatgcagtccattagcaggttctattctacattcaaaataagttccaaaacagacaactacttgccttttccatcatctttctaagagtatgcatccaacttgcccaccgaccttcctcctgccctttgtatttgttttttcaagacaaggtcacgctggaaggctgtggtgtcatcatcgctcactgagcctcagactcctggctcaagcagtcctcccacctcagcctcccaagtagctgagactacaggcacacgcccccacctggctcttcctgccctttgaacatcaaactcctcctcaggacctttgcacttgccattccctctggaatgtttttcttccagatctttgtgtgactgttccttctgcttcacattacgctgttctcagctccactgtcacttcttcagagaggtctttaacctgtctgaaagagcttccctctcccctaccattcttcatttccagaaccttttttctttcttctagcccttactactctgaaactatattgtttactactctgaaactgtattgtttactactctgaaactgtatttatttctcattagcatgtgcgtatcataagagcaggattttgtcttactgagccattccaagtttttaggcgagtgcctatatatactgagtgatcaataaatatttattgaatgaattgtagactgtagatgctagacatgtaagacattatcatgaaggctcttgaatgtccgaatgggttgttgctgtgtaatttgctaattagttatcagctgttgtgagtctttgttctgaataacttgatcacaactcttttaggaaagcttaataatagtacaactattatctcattatatattcacataaattctgtgagatagtatttattctcaccattttataggtgagaaaactggcctgtcttgaggtttgttataatgcattagacttaggaaccacttaagaattctgttgctatgacatgttatgtaaaatagtttactttcgttcttaaaattcatgtttttgtaaagaaaatcttcaaatgtttgtaatctcatcaacctttttctatttgaaattgatcttaatgagcaaattaacttagaaaataaaatcacttctaaactggtataaacaagaagagtacctagcacatagtatacactcagtaaatatttaaaggaatgcattattaaaaactgacaaagttctacttagctttctgagttacttatttttgttctgtttttaaaagatgcacagtttgaaaatgatgaacgaattacacccttggaatcagccctgatgatttggggttcaattgaaaaggaacatgacaaacttcatgaagaaatacagaatttaattaaaattcaggtatgaataaattacttttatgcttattatatttctagaaaataacatttaaaagaaattaagaggaacctagtagaagttgagcagtagtaaaatttaatgtattgtttctcttcagaaatttgacctttggtttatagtcttaacatgagcactgggggctggaacttaatgtgccatacttaagcatatgttgcctctatgttgtggaaaatttaaaaaccaggggtttgtgcactctcaattgatgcttaaagattatgtaaaaagtagatactatttttaattaatggtaaattttagatttttgtaatcaagaatatataaaattttaaccaagtagggagaattttagtagacagtaagtagcccaaaacgtcattcaaagatacaatagctagcagtcaaagcaaatactaggtactttcttagttaaataaactttttctcttttgagaattttaaaaatttcttttcaggttggataaaagaaaatccaagtcattccccaccttcccaagaattagtgtggtgattgtcaagtagaattaggacctgaggaaaagaaaataggcagaaaaacgactgcttcctttatgaattcaacccagagcaaagagatttgtcatgttattgcaatcttttaggctgctagagaaagcaagtctttcttaatacactactgtaaaatcaaatgggtgacaaagtttatagcaaacatttaatatattccttactatttgccaggcactgttctaaactctttcacataaaactcttacatcctcataacaatcctatgaaataggtactattgtttccaccattttacatataaggtaactgggacaccaagaggttaagtagcttaccaagtttacatagctacccaaatggtaagtggtcctgtcttacttaccacgttaccaaaaatgccaatgcatgaaaaaaatgatcattaaaaaacatctagcttcttaggtgtgtattagatattttccagggatctgactagcaaattttatgtatcctaatcatcacaaacatcatctacctcctctcatttcccttttactcaaaattaatatttaggtgggtcctaaatgtgtgtggtatggcttctaatttatttattaatacatacttttcatttggtctaaattagagatagaatgctgggcatttatgaataaatgtgcatgggaccagtgcaaatttttcatgtcatttcaagcgacacttattttgtctttgaaaaataattttatatcttttatcaaattaaaattattaagctacataaaaatgttctcaacagaggatttcagacttacctgagttatcttaataattaaataactattgggtatttataaacgcagtctaaggttggtatttttcatcttttaggctatagctgtttgtatggaaaatggcaactttaaagaagcagaagaagtctttgaaagaatatttggtgatccaaattctcatatggtaattatttaaattaaaaccatagaattttagaagtgtttatgtagagtgaggaaaactgaaagaaaattggaggagaaaagaaatgctttatcttttaaacagtatagaataataccgtgcaacagaaaaactacgcaagtcacatatgtgatttaaaattttctaataagctggacgcagtagcttacacctataattccagcactttgggaggctgaggtgggaggatctcttgagctcaggcattcgagaccagcctgggcaacatggagagatcctcatctctccaaaaagaaggaataataaataatgaaaaataaatacaattttccagtagtcatattaaaaaagtaaaaagaggcccggtgcaatagctcatgcctataataccagtactttaggaggctgaagcaggaggatcatttgaggtcagtagttcaagagcagcctgggcaacacagcgagaccctgttctctacaaaaaaattaaaaattagccaggtgtggtggcgcaatactgtagtcctgaggtgggaagattgcttgagcctaggaagtcaaggctgcagtgagctataacgctgccactgcgctccagcctaagcaacagagagagacgctgtctctaaaaataaataaataataaaatagtatagtatttgcatataacatatgtacatcctcctgtatagtttaaatcatctctagattatgtataataacttacacaatgtaaatagttgtactgtttaggaacaaaaagatacaaaaaatctgtatgtgttcagtacaggtgtaattttttcccccatacattttgtggaacaaatatatgcatttcttttgggtttatatgaagagtagaactgattagtcataagatgtgtacatactcagttttagtagatattgccaaactgttctccaaagtagttatgtcagttcctccagtagtgtgaaagaattctagttgctccacacaccttgtatctgggttttcattttagccattcaggcaaatatgtagtgctatcctgttggattttaatttgtttccctgatgaataatcagattgagcaccttcccttgataatgttagtagatagagttggagagtgactaccttaatccagtaaggaacctgggcctagtagagagtaggttgggcagttttggcaaggctttgtctatctctaatttaaccctgtacctggggtataaccctccagaaatttcagccaatagcctgatatgtctgttgggttttctacccttaatattttctccatagcactatgagactactgaaaattctactctgcttatacctcccagaagaggaaaacttaatggccaggaaatattaagaggttaagataagtacttgacctcactagtattaatgttgcctcattagggcaatattaagtactatattgaaataccactttccatgcctcagactggcatcaattaaaatgtcttagaatatcaacagttgtctcaacaaattgagaaatgattgtactgcctgccataacttcctttcaagactgtaaattggtacttctttgggagatcattttagcaaaatattttaagcatgcattccagcaattccacttctagacaataccttagaatagctggtttcacttttaactgcatattttaaaagccatgaagtttaaaggcaacaaaaaaccaaggccttcctgagacagttgctctgggattgagcctaagaatttttttaaagttctactttttttattgtgcagccagcattgaaaaagctactgtccaagaaaaacacatacaatgcacagaagataatgtagaaaaatgttgaagagcgatacaataattgcaagtagcctaaatccctcaataggcatgaagaatggatgaataagtgatgtttttgatcagtgtagtactttacaatggcaaaaataactacttctaggaatatcaaatcagcatggataaatgttgtaaacatagagttgagtgaaatatagcaagtttcaaaagaatacgcatcgtacaacactatttgtagagttaaaaccatgctaagcaatgctacatatttgtggatacatacatatgtagtgcaagtaaaggaattcctgggaatggtgaattctaaattcagggtaatggttacagttaggagaggaaagggaatacaatcagattatggtagtaaacagggattttaaccatattgattatgttttatttctgaaactgggtaatggatactctggtttataatacatatctttttgaatctgtctaaaatgtaaaatattttttaaaatgaggagaggccagaagaagtcagaaaaaggtacattggcatgccatttaaaacttaattttaaaaatatctgtgtctcttgagtttgtaaagtgatttcttttcaattaaataatatgtgacaaaaatcgttgtatctgtaactttgtgtgatttatgttaatatatttcttctgttttctttagcctttcaaaagcaaattgcttatgataatctctcagaaagatacatttcattccttttttcaacacttcagctacaaccacatgatggagaaaattaagagttatgtgaattatgtgctaagtgaaaaatcatcaacctttctaatgaaggtatacatattattcaagagtgactaataatagacttaaaggaaacgttataataaaggagaatacttgaaatagaaatcctttaaaattaatcagaatttttcattgtggttttgtagaaaggtgtggtaaaatgttacattttgtggacctaattaaaagatttatgagtgatatgtacttttgtaacttttcaaaattagtttggggaaattttcaaaagaaaaagttgaagggaaaacttagaatgaattaaaaataagaaataggcaaaagcaaatattttaatttaagtaaattttaaagactttttaaacatatttttggggaaaaatagaattgtattaaagaagggccttttaaaatttttctaggccaggcgcggtggctcatgcctgtaatgctagcactttgggaggccaagtttcaggagttcgagactagcctgggcgacatggtgaaaccccttatctacaaaaaaatacaaaaaaattagctgggccgggcgcggtggctcacgcctgtaatcccagcactttgggaggccaaggcaggtgaatcacacggtcaggcggatcacacggtcaggtggctaacatggtgaaaccccgtctctcctaagaaaatacaaaaaaattagctgggtgtggtggcaggtgcctgtagtcccagctactcaggaggctgaagcaggagaatggcatgaacctgggaggcagagcttgcagtgagctgagattgcgccactgcactccagcctgggcgacagtgagactctgtctcaaaaaaaaaaaaaaaaaaaaaaaaaagctgggcatggtggcatacacctgtagtcccagctactttggggagttgaggctgtagtgagctgaggttgagccactgcactccagcctgggtgacaaaatgagaccctgtctcaaaaaaaagacatttctggtcaggcgcagtggctcatgcctgtaatcccagcactttgggaggccgaaatgggtagatcgcttgatcccaggagtttgagaccagcctgggcaacatggcaaaaccccatctctaccgaaaaaatagaaaaatttagccagacatagtggcacacgcctgtagtcccagctacttgtggcggctgaggcagaaggattgcttgaacccaggaggttgaggctgtagtgagctgagattgaaccactgcactccagcctgggtgacaaagtgagacttgtctcaaaaaaaaacacatttctagtcaggcgcggtaactcacgcctgtaatcccagcactttgggaagccaaaatgggtggatcgcttgagcccaggagtttgagaccagcctgggcaacatggcaaaaccccgtctctacaaaaaaattacaaaaatttagccaggcatagtggcgcatgcctgtagtcccagctacctaggaggctgatgtgggaaatcacctgagcccaggaggttgaggctgcagtgagctgtgattgtgccactgcactccagcctgggtgacagagtgagaccctgtctcaaaacaaacaacaataaaatttttctaataacattttattttctgtcttggcctccaaatttttaagttgacagtgttatagtggagcatcttgattgatttgagatagtttttatttgaaaatatctagaatttttattttttttttttttcatgcagccttttctcttaaaattgcctagagagcattttgtctatcaaatatatttacaaggaaagaccaccttcgtaacgctgataaaccaagcagatagctaatgtagctgctggcagtgtcataattattggtgaaaataacaacacagtgcccttcattggcctgtgaacagatacattagctatgactatcaaagaattacaaggcttaatttaatgctatttgtttaaaatggcttaatgcatttcttcctatccttctacctccacgcacgttttttaaggcagcggcaaaagtagtagaaagcaaaaggacaagaacaataacttctcaagataaacctagtggtaatgatgttgaaatggaaactgaagctaatttggatacaagaaaaaggtttgtaatttaatcaatttgtatattttttgttttatgaatgttctgtctttatgtaaaattgatatgtctttttattaaaaataattattgagtagcatgttatcttgctgatgattaacatttaggtatttgaagtactgtagagttatttcatgacttgtgcaaattatatatgctaagcaaaagtagagaataagaaaatattacagtttaaataatgtggatagtttaccattcttggggtatgcttaggaacaagggtgaggttggactcctgtgccccttagttgtgtttagattctacatgttctcattatgtgattcatgtttcactgtactaagagtctagtattttaagatattattcatatatcttctctaagcataagctcactgcttcatctggtgctcaactgaagaaatagtgatttgctttaatactggaggaaaacaagttgtgtcagtcctatatattgagagatagttgttaagtctccaaaattattttttctttagggattttcaggggtgattgttgtcttttgttttagaagcttaagtatcttcccctattgagaaagatataactcttaacattataaagatcttcttttctgttgaacccatggtctgttttctctgttcttctacccttaaaccaaggccagataatcaaatctctgtggtctctggatgggtatatttggaaatggatgtaatattactttcttcttgggaccatgacctaagtgttgcagggaccccatcttaactacttatttagaggtggagattggggttcaagttggatctacactgcatttgtcacatcttaggactgaggttctgtcatcttatagtggcccctcctattgttcctgcctgtcaaagcatgacttgttcctcaggggttcatctctccaaaggctgtactaaagtcttatttcacattgatgtacttttttctaaactccaatttaagaagtagagattccatttttattggcccaattacttccttttgtttcaaaaatcaaagttgaatgatactaatacccagtacattcttgtggccaagccatcctgctcatgataatattgctaataccatggttcttacagataatcatgagcacacttcctatggactctccttatatagtgctacccacttatttcagatgctctcctagacacaaacacagtgcaatccatgtgtaccaaacagaactcttcatgttctcatttgcctctctacaccctgcctctctttaacctcacacatccagctgctctccaagtattaggaaccgcacctcagaaatgcttctccaatctatttttatctatatagctttgtaccattcaaatccatccttgacataacttctagagttagcttccacaaaaataaatctctttagatcactcccagcttaaaaaccttttggctcctatttcctactagatgagtcagaatttattggcatggcttataaagccttacgtagacccattttttttttttttttttttttttacatacagtcttatccctaagcatgaactcctccctgtccacatacatggtactttctagcagcacagaagctttgttccttctatttgaattcctatcattttattctctccaaggcaagctcttccttgccattcagtctatctcagagatcacctatatgaagtcttgcccagctctgtaatcagagttgttacttctgtgctttcatagcatacatctctataaaaggacttatcttcgttggtaacttatttgtttacctgattctttcaatagattgagaattatttgaaggttcttacttagctttgaagcatcttaattagcttggtatccttgttgcctcattcattaccaggcatacattagaacttgctgtacactagttacagggaacaaaactaaaaccagaaacagggtaaagatcaagaatcgagcaaataccaaaaccatcgtggaagcagaaccagggcaaataaagcatcaaaccaccagtgtcatgacagttaccagtaaggattcaagtaaagcaagtatagaatcagaagtgtgattgtgaggtcagacaaatcctagaaaaatggaaacctccatgttatgaagactagatgaaataaatattttgctctgataaagcttatacagttgttccttggtgtttgaaggggattagtcctaggacatccatccttcatgaataccaaaatccatggatgctcaagtgtcttacaaaaatggtgtaatagccaggaacagtggctcacacctgtaatcccagcactttgaaaggctgaggcaggaggatcacttgagcccaggagtttgagaccagcctaggcaacatggcagaaccttgtctttacaaaaattaaccagtcttggtggtgcatgcctgtagtgccaactacttaagaggcttaggtgagaggattgtttgagcccggcaggtctgcagtaagctgtgtttgtgccactgcactccggtgaccctcggcgagaccctgtcaaaaaaaaaaagggggtgtaatatttgtatacaacctacacacatcctcccatatactttaaatcatctctagattacttaaaatatctaacacagtgttgaaatagttgagatggacagcttcatggaggtagtagtcttgaacaggggcttttgtaggatggttaagatttttacagatggatagaagaggaaatatcattttaggagagaggaatattactagtgaaagcatggaggtgtaaatagtcatgctgtgtgtatgtggaaaccattttaactataacaaacgggaacttaatcgattcccaaaagttcaattggagactggtggggagaaccagaaattaaaattgaacccatcaaattgtatactttaaacatgtgccatgctttttatgtatcaattataccttaataaagcagtttttaaaacttgaattcatggaaataaagtgccgtagaagagtttttgaaagagtgttataaatgcttgactacaccattaattatgcttatgtttggagaaacttggtttaatacctcttataagcatgtctggacaagaattagccatgttgtaatggactgtatatgtcccgatgttaccaaggtttctttccaaagttatttttttataaattgaaatatgccttgactatgtggaaagtactatccttatgaaaagtttcttttgtttacattcttacaaattttttcttcttttaaagtgttagtgacaaacagtctgcggtaactgaatcctcagagggtacagtatccttattgaggtgaagtaaattgacgtttttcttctttgtctttcaaatctttgattgaagcaattcatgcagacctaataaaaactaccacataaatggtacaattgaaagaatatctcagggtcctagttagcccaacagatagtcacgactctgagacatcttgaaattccaaactgtagagacctgctctgagactgggttgtttcacattgtttctacaaagccattattggaatacacatatagggagttcttgagcttaaaacagatgtttagtaaacacttctctgtcacagaaacaaagatatgatactggggcaggaaggggatggcaattacatttctaatgaatgccccatgccaattttatgaaagttacttgaaaaactttatttgatctaatagaatcgctgtgacagacaatacaacctgtcccgagggcagaaagtctgcatgaatgatttctaacatagagcagttgggatcacaagtggaaccatggggaggaggtggctgacttcatgtggaggaggtgattggacatgaggaactgagaggccaagatggtatatgaattgtctgtgagaacactgaaataattcataatagcagcacttaggtgtagagaaagatctgtgaatgatgaagaagtgcttggaaggatggtaaatggctgtgaagaatgattgaaggtgatacatctcagtggcatgaatcctcaaggctgaagtttctatggaagcaggatcttgaaagtggcattcattaggaaatgaaaactgctgtctctggagtcctatagtttatggagggtggaagattaagccaatctctacttgagaaggctaccaaggagagaaacattgtccccaggggaaagctagattttagacaaggcaaagagcggagaggaatgggtgaagagattgagaatgacattctagaaaggacaatagaaagtcttaggaaggagggacagaggggaagagagaaaggatggctggtcacctagagtatctatagggataaaagtatagctaaaataacctacattttaggtggagataatacagctgcctaagcttaggtgaactgctttttgaatcttagtttgctccttcataaaattggattaatataataccaatttggcagagttttcaaaaaaaatgatgccacatcctgtgtttccaaacagccttacctttcaaaactctttttggaagctgtaaagataatcaagtgatacctgccattatgtaaaggaattttggaatccgtctttggggaaataaaagccataagagagaatgaaagctaatactttgtagtttaaggatttttttccttgatgtatctaattggaaggccgaaagagtcttgtcttttcttttttttgcctgcttcttctgagacatcaaaaaacatcttgatttctgcggagtagatgagatggagaaagatgagacaggcaacagaaatcttaagaggccacaggttaagatggggtactaagcagggagagcaccaaaggaagtaggccaaagtattaatagaagatcctagaacagattaaggcaaatcatttacctgttttccattgccttactatctttctggagccaattacaaactttcctgttttattttaggtctcacaagaatcttttcttatctaagttgcaacatggaacccagcaacaagaccttaataagaaagaaagaagagtaggaactcctcaaagtgagtactgttataacagttttagaaggggagaattgatgtgtcctcaaacaatccagccattgactttaccactatagcaaaaaaacacacacttcagaaaactgaagcacaaagtcttgacttcatagagttaattgagatagtgtttaatttagaaagttagctattttgactgtctagcttagggttcttttgctatggtggtacactgcttttctaccttcactgtgttcagcaacttcaagtatagtcatatgccacatcatgacatttcagtcaaagacagactgcattgcatataggatggtggtcctgtaataatgtaatggagcacatatggaaacttgataatgtggcacttgatattggcattgcatatcaagtaggggaaatgattgataattagcaatggtactgggaaccgtgggttttctatatgaatatatatatatatatgtatgtttgtgtaagtgtactcttaataatgttcacataaggacaaaatcacccaacgccccatttctcagaacatatcccccttgtaaagcaatccgtgactgtagttacttttcagaaacattaagtacagttgattcttgttattcacagtagttacgtttaataaagtctgagagcgttgacttagcaaattacaagtttctttttggtatgtagtcatttaacaaatgtttattgaccccacagtaatattttaggtactgaactgatactgagattttttttttttatactttaagttttagggtacatgttcacaacgtgcaggtttgttacatatgtatacatgtgccatgttggtgtgctgcacccattaactcgtcatttagcattaggtatatctcctaatgctatccctcccccctcccccctgagatttttaatatggatctaaacctaaatacttattgataaaaataatagacataatgaaattaggtttatttctccatgctcataaggtaccatcttggtgccaggcaaatgataggcctgcagtaaatattatagaataaatttgttcatacctgatggctgatgacatggcaaccattagcaaatatttgtaaatagagttctaaaatatttacattcatagatatcattcccatttttaaagatgagaaaacggaaactcagtaaagttatgtgcttaatgttggtggagttccaagattggttttctatacctattgctgcaagacggctgggaatcattttaaatgagaataatgtgagcattttcctagggttttaatttcatagtatgaaattcaaagaaaaggaaatgtaggccaggcgcagtggctcacgcctatagtcctagcactttgggacgctgaggcaggtggattgcctgaagagctcaggagtttgagaccagccttggcaacatggcgaaaccccgtttctactaaaaatagaaaaaattagccaggcatggtggtgcctgcctgtaatgccagctactcaggaggctgaggcacgagaatccagcttgaacctaggaggtggaggttgcactccagcctgtgtgacagagcgagactgtctcaaaaaagagaaaacatggtttatcagcaaactcgaagactataaactctttgcaaactggcttgacagtgactgtggctattgagtctataaggtctttgagttttagcacattttattaggtgtcagtaataagtacgttttcttaaaaaaattcagtgtacttcagtggtacccaggtaccccctctttatagtttgaggctaataattttgtttgtgctaaacctttttttctcttctttttctgtttttggagacagagtcttactttgttgcccaggctggaatgcagtgcagtggtgagatcttggctcactgtagcatctaccttcccaggctcagttgatcctcccacctcagccttccaagtagctgggaccacaggcacatgccgccacaccctgctatttttttgtttgtttgtttgtttgtttgttttgagatggggtcttgcactgtcaccctggctggagtgtggtggatcaatctcggctcactgcaacctccatttccaggtttcaagcaattctcctgcctcagcctcctgagtagctgggattacaggagtgtgccaccacacccggcagatttttgtatttttagtagagacggggtttcgccatgttggccaggctggtctggaactcctaacctcaggcaatccgcccacctcggcctccccaaagtgctgggattacaggcgtgagccaccacacccggcctttttgtgttttttgtagaggtggggtttggcatgttgcccctgcaggtctctaactcccaaactcaagcaatctgcttgctgtaattgtgctgagattacaggcatgagccactgctcccagccctaacctttttttcaaaaactaatttttgtgttgtaaaattgacatatgcttagggaaaaaaaatcaagttaattcagaaaacttgaaagaaaaagccaaatcatccagatttcatcagtgcagaaaaactcaccagcattgagtgaaattattaatatttgagttgaaagctttttataggtaaatgcattcaatcctcaaaacaaccttatgagattagtgctttttttttttatcatctccattatacagatgaggaagctgagacttaaaaaggtaaataaaatgcctttggttacacagtgtatgaatagaacaggagccaaaatttgaaatcagacagtctgactccagagcccaggcttttaattgcttagatggactacctcagtagaagaatgtatagattgaaagcaaatcaaattttagaaaaatgtcatcaagttacatatgttactttaaaatatatttacatttaatttttaatatgtaaaactgaaggattcagtacttcagataaaggtggtttcacaagaaatctatcagtaacctttatgatctgtgtaaaataaagaatatgaaatgctttaagaggtcattcaactttagttaatcaactttagtctgttgattgaccttagcaaaaatttcttccaccaatccccaaattttcttggttatattttatataatcaatagttgtagcattgttttcccatgttggattttcagttcaaaatactttttcatttttgtagagacttttttactgacctatgagggaagttgtttaatttccaaatatctttctgttactgatttttagtttaattctatttcagtctgtgaatatgcttcgtagatttttttttttttaagatttgttttatggcccacagtatggtttattttggtccatttggatgtgcacagagaagaacgtgaattctggcattgttgaatgaagtgttttaaaatgtcaattaggtcaagtttttaataatgctgttcaggtattctatatatgtactcatttcctgtctattgttgtatcaattagaaaagtgataaatctcccaaatataattatgaatttgtctttacatttatgtgattatttgctttttgctattttagtcccctagcacctgtttaaacatttctcctaatgctaaaatctctccatcagagctagtgtggtttccattttcctgactggaacacacccagtatatatgtcaaaatcccatatatgtcaacatcccatgtttgtagtagggtaatcttattgtttttcaagagtatcttgactattctggtgttttggtgttccatattgtcagggaaaaaacctagccatagggctttataagcagtaaacctgctgctactttatagatacaaaaggtagacaacaagacttagtgacttaatgagttagagtaagacagattattatagcaaacaacatggcattgatgtagttgttcagatttccctaccccaagtccggtggactatgcaacaggcctaaatggatgctgcgaaggcagtaagttatatttcagctgaggaaaactcagagccaagggcccagtgctttttgagtaagcaacaaaacattgtaacaaatagcaaacaagccagtaccctctcccaggagagagcagttggcctggtcatcatgttgtggtttccttgacctgcttaattgcctatctgactggctatagaaaatgcactatttcaggagatgaataaggcttttctacattcaacaggaattgcaggggtgctcagagccaatagtggactacctgtcttaacacataattttagaataattttgttaaactatacgaagaaccctgttgagatttttatgtgaaattgcattgttaacaatagatgattttgcagagaactgacaccattacattaagtttcctgtgcatgaacaaaatacatttctctaacatgtttttatatatacagtcatcccttggttttcacagggtattggttccaggacccatccccccgcccccacagcagggataccagaattctcaaatgctcaagtcccttacataaaatggcatagtctttgcatatagacctgtgcacccgcctaccacatgctttaactcatccccaaattacttacagtaactaaaacaatgtaaatgataaataactaaattgtagtaaataattgttagactatattttttatttgtatcacttttattattgtagttatatataaatatatataatatatatttatatataatatattatatatatatgacctatgagggaagttgtttaatttccaaatatctttctgttactgatttttagtttaattctatttcagtctgtgaatatgcttcatagatttttttttaaagatttgtttaatggcccacagtatggtttatatgtaatataatatataatatatataatatataatgtacataatatataattataatatatataataattatactacatataatatatatcatatattatataaaaccccatatatactatataattaataatttatatattataatatataataatttatattataatatataatataataatatatattatataatataatttatatataattataatataataatttatatataattataaagctttactatgtatataaaacatgttatgagaagctttatctatcttatctacctatctacttacctacctacctacctaactgttggccctctatattcacagattccacatctgtggattcaaccaaccttggaataaaatatttggggggaaaatacatataaatttttatatataatatataatatatattatatatgttatattaacatataaaatatattaaatatatttatatataataaatttatatatttggaataaaatatataaaccttggaaccttggaataaaatattcgggggggaaaatatatatattttttatatataatatatataacatatcataaatttattatatatattatatattatatataacatatataatatatattatatgtataataatattatattatatataatatatattatatagtataatattatattatatataatatatattatatagtatgaaatatatattatatataatattatatagtataatatatatattatatataatatatagtataataatatatatattatatataatatatagtataataatatatataatatataatatataaatatgatatataatatatataaatatgatatataatatatataaatatgatataatatataatatatataaatattatatatatataaaacatatatatatttttccccccgaatattttattccaaggttggttgaatccacagatgtggaacctgcgaatatagaaggccagcagtaggtaggtaggtaggtaagtagataggtagatagatagataaagcttctcataacatgttttatatacatagtaaagctttataatttactacatacaaatgtatcacttttgataaagttatctaagaggccatgacctgatggctcatacctgtaattccagcactttgggaggccaaggcaggaggattacttgagcccaggaattaagagaccagcctgtgcaatatagtgaaaccatgtctttacaaaaaaattttaaaaaattagtcgggcatggcggccggtgcctctagtaccagctactcaggaggctgaggtgagggaggataaggcagaagtatcacttgagcccaggagtttgagctgtgatcataccactgcacttcagcctaggcaaaagagagagaccctatctcttaaaaaaaaaaagttacctctaagaatgttagatttttttgtggctattgtaaatagtatctttatattgttttaattaaattattttaactgtttgttgctaatgaatagaaatcctattgctaatgaatgaaatcctttttgtgtattgatcttactgatcttttaattctatttgtagattctcttaggttttctgcctaaacaattatcatttttcagtaattacagttctgtttcttttcagttacatatatttgtcttaccaaactgactatgaataagaaagaaggagtgaggaaaggattatgcttcttagtactcctaaaacattatcgtaagaaaatttcaacgatcctatgcaataaatatttttcctttttttttaaacagataatggaaagacaggttcagggatgtgaaatgatttatttaaagacatataaaagaatcaagactcaaaacactccccctctgatttcaaaggctgatctttgcactataccatactgcttccagatttgaaggaaaaagttaaacatgtactttttcttagaatagcttagaaaaggaatttcattataatcattaaaaatataattgctcttttttctttaatgtaaatcaatatttatgacattatttttctacttttaggtacaaaaaagaaaaaagaaagcagaagagccactgaaagcagaatacctgtttcaaagagtcagccggtaactcctgaaaaacatcgagctagaaaaagacaggtatttggttttttaaaattcgaataacgcttatggacattaaagttataacttgaataattgtgattatttctgttcaacctccccaaaattttgagtgtaaaatatttgccctttgccatcttttattttgccgtcttagataggtgactaatcagcctattcaaaatgaaatacttcacccatatttaaaaagtcttaagttgggtgttggtactgacatctgtttggaattattgtgatactatcataaaatctgtttattagatgtaaggtgggacttaactccacattataagctttgatgtttaaattttcctaacagggatccagtgtaaaaagagttttctttacttaaaaacaaagaaaagataccatttgatcacaaaattttattaaggtgggtcaatttagggcttgattcatttgcttcccctttcagtgactatagtcttgtgccatctgtccagtgtctgaaaccattattttatgtattttttgattgtctagttgttcacagcagatggataaatctggtctttgtttttgtggtgtgtgtgtgtgtgtgtgtgtgtgtgtgtgtgtgtgtgtgtgtgtttcccccttttttttgtagagatggtgtctcacaatgttgcccaggctggtcttgaattacttggctcgagtgatcctcccaccttgggctccaaaagtgctgggactgtaggcatgagctactgcacccagtcaggcccttgttttcttttgtggctggaaccgttttcttactcgaaggtgcctttttttttttttttttgacaagctaattgcaaatagttcatactgaggtgctgcagatagtgtcaagttgcacgctactcggaatatcttctgtgactcaaagttatgttacccttcatttctcccccagtgaacatagcaagcaacttctacttttcatttgcttcctacacatattacttgcctttgtgattcccttttttagccttgccatctctggcctttagtaggttgaggggagctcctgctgttgctgaccagagatttagggggtgtacctcagggtattttcattagaaaaacagatggcacacacttcctgagatctgtagacagagttgctttttcatacacctaagttgcactgattatttataccctttctacctacattatggttcaggttgtaaatttctcttaacttttttcagagtttgggattttatttcttgttgcttttgggtgaattcccaaaggagaagagggaaatgctaaccttatgctaccatatgtgaccacagtcatgcatatgttttgtgctggattttttttgcagtttgaatatgatgtacatgtatatagtttgttatttatcctgcttggtattttctgagcttcctgaatctgtagtttggtgtctgtctttagttttggaaaatgctcagccattattacttcaaatctttcttttgttcctttccttcttcttctggtgttcccattatgattccaaatgttacaccttttaagattgtcccactgttcttagttattcctttatctttttcattcttttttctgtttacttttcagtttgagaactttctattaatatatcttcaaatgtactgattctttcttcagctgtgtttaatctgcttatgagcccatcagaggcattgttcatttctgttaccatgttgatttctggcatttccctttggttctttcttagagttttcatctctccatttacatttacccatctgttcttgcatgttgtccactttttccattaaatcctttgacatattgatcataatcattttaaattccaagtctgacaatttcaaaatctgtgccatatcttgagtgtggtcctggtgcttgctttgtctcttcagactgtgttttttgctttttagcatgtttataatattttgctgatagctagacatgatatatcaggtaaaaggaaatgagataaatgatcctttaatgtgaggttttatgtttatctgtctaggagttaccgtttgtagctgtaggtgtcaaaggctaaaatttcctttagtgtcctgtttttgtctctcttgttgtctctgggtttccctagagactgctttttaataagaatctgagggacctctttcaactataacgcccaggatcctgactaatgtagtggtaaggtaaggggaggtgaagcgttctggagtcctgtgcatagttctccttcttttagtaagcctgtgtcctaggctgtgaccttcataagtgcttctcagcccaccaccccttgggtgagacatgaaggctagagaggggtggagttgagtatttccacaggtaagttaggttctggtaaaacctcagttggttaggttctggcaaaattagtttctcttgaggaaaggattttgttaagaagaccagaacgctttcctcatttattttgaaatggggagtatttctaattggggagtatttcaaaatggctactttttccctccgcctgtcagaagcaggaaggaatttttgtgtaatctttaccctgagacctgggggggctcctggagataaaactcacaaaagtttgtgagtccctctgaaactgggcccttggagtttttaactctgaagcttatccacacggatcctccatcagttcctcagtcacagttaattgctcctaccagtattggctccagctgtgagcttctgctcctggcctttctgtccccagtaattcttgtgattttctcaatctgcctctctctctctttagttttcaggacagcagtttgccctgtgacatttgttctttgatgtatctaagaagagttactgagtttcagtttgttcaacagcttttttcttctggggactgtagtgatgatttccaagctcttcacatgttagattggaaaccagaagtctctgtcttatacatataactgatctttccctatagttcttccagcagccattccaaatgaggtgttatttacagatatatatgaggaaaacagttgtttctcttctattcaaaacgaaatataggatatcgaccacataatcagtgataatatctatcaccatttcctatgccaaaaaagaattctgtggatatcacaagggcctggttttattttttagctttccgttgttggccttttgttaaaatacttgttttagaagataagtgacagacttaattttattttgtattgaggtttttaaaaaaaaaaacttacggcaatagcccatgtctacttggacagttttcttttgctgcattggtctgttaaagatatttcttccttcctcatcagaattaaagagccctccttttataaacttattccattaaagaagaaaagtaaatgcctttcaaactgttttccataaacagtatgtaatgagaaatactgtagcagtattttcttttactattcgtagtatcattttaaggcattaaaaagcattatttgttctttagaatggatatacagtgcagatctgagttatgtaatctctagccttgggaaagaaaaagattggtgtgttttaatttgttatgtgctctttgtatcttttcaggctattggcatggctggggttgttaagattttgtatttgattttttgagaaaataaaagacaaatgacaataaaacaaaggaaatgggttgtatgggtttaatgtccagaaatacatcatcttaaactcttcccttaattattactatcagtggaatctggtacaatcagttaaatgtataaaatgaggaaatggaaagttttaagcacaatagtagactttatgaaattgtactgcccttatgttttctttctgatctgacacaggtcagttgtgtcactcattaaactctagctatagaaagtagaagttggtaccaatgactactaggccacttgaacctctaaacttaaaaattacagctttccttacttgccagacgatagcttattctgtatgatgttttcaaaactctttcagtcacaggtaaaattaagcaaagactgaaaacattcagatcaagcaaaacaatcaaggcataatcaaccatgaaataacactatatcaagctaaagttactctttttcaatagaagaaaaaaataaaatacttaatgctaaacactgttagttttcagttaatctatactgacaacattactactttcctctaggttaggggtgagcaaaatttttctataaagagcaagatttataatatatttattactaatgtattttatgtatatttcacatacatagtttctgttacatattttaaatatattttttaaatgacttaaattttaatatggttcttagctccggggctgtagaaaaccagccttgggctgggttttggcagtggcttgctgtcccctgctatagatgatacatgggaaaatactgcttaaacatactgcacccaggaccccaaataggattcagaaaacattggtcatttcttgaaagaaaggggcttttgtattgtatcaaacgtcatctgtgcaccttattaaaaatactacagctcagataagaacaagaaaacaatgctgtatatgtgtatgaaatttgtctaaaccacaaactactttttaaagctgaataacgtatatggcaagtttttgaaagaacagaaatgcttaacttggagaccatggagttgataggctctttaaagagagtttatgtggcccccaaatttgtatatgaaattttagatactatacttttctgtggagtacgtctgtaagatttatatgaccccaaagattaataacccactgttgaagtgcttttaatcagtcaccccacacatgaaaaatttattaatgcatctcttggtttttgtcagttaatgacaagcagtgtagtgaggttttgtaggagtgaaggccgagtcaggcagtaatagatggtcataggaggctgtcagcctttgtctagcgattgaatagccatgtacttgtaagcagcacagttgccgataggtgtgctgcagacaaacaaaagcaaaagcacgtacagaagagaccaggttcgtatcttggatttaagtcacaaagcagaggaatagcaagaacaggggatcaggtttaaggtagctcaaacaaacttctgcatgggtttggttacggtcactgccaactttttggtactgagtcatacacgagatggttctcatgtcatgtttgtattcttcaggccaccttgaattctttctaatattgcattagacaattgaactggatttttttttcttcgattatagtaaagtacacatgatataaaatttaccatttgccattttaactatttttaagtgtacagtttggtagcattaaatatattcatattgtgctaccatcactaccatctatcaatagcactcttcctcttacaaaactgaaaccgtactccttaaacagtaagtccatttccatcctcccagcccccttgccaccatcattctactttctgtttatgagttggactattctaggcacctcatatcagaagtagcatagtatttttctttttctgtctaacctaatgtcctcaaggtttatccatgttctagaatgcgtcagaacttcctttttaaggctgaattatataagtataatatataatataattttgtttatccatttatcagttgatggacagttgggttgcatccacattttaactattgtgaataatgctgctatgaacatggatgtacaaatacctcttcaggtccctgctctcgactcttttagatatgtacccagaagtggaattgctggatcatatggtagtccttttaaaaaattttttgggtaactgtcatactgttttccatagtggtgctataattttacattcccaccactagtgcacacaggttccaatttatccatatcctcaccaacacttattttgtgtttttttgatagcagccatctgaatgagtgtgggttgatgaaccgggtttttaaagaaaatctgaagtgctggagaatttcttgtagtctagacacagtaaataaccacgcagatggtcaaattgctctttcagcatgccaacagaaggaataattagttagttgcctgtagcaaatgccaagtatcagtaatttttctgtgtatagtattaaatttgatttttaaaaatgtttaggaattttctcccagcataaaattaaatgtttttaattagtttatgttagttgtatttttgaaagtctattttagacaagatttgagttttatatgggtgtgtaatacttcccctaccataggcagaacaggtttttcactgagttcattagtgaactactaaacattcacaaagcctatttggagatttggaggataataaatacaactattaacaattgtagaagagcattttaagagacagtgtgggcttaaagtcagacaaattcagttgacatgtagcactgccactttctagctatctgatcttgggcagctgagcttacataaaatgaacagtaataataatgacccctaaaaatgttacgataaatgtaaaatcttttaaaaatctaagaaatgtttagagaagtcttccgtctttaagaaactaagcattattttgattttttaaaactggcatttatagtaggtattttctttttgaataattgtttctgtaaataactgttttactttttatcaaaaggcatggctttgggaagaagacaagaatttgagatctggcgtgaggaaatatggagagggaaactggtctaaaatactgttgcattataaattcaacaaccggacaagtgtcatgttaaaagacagatggaggaccatgaagaaactaaaactgatttcctcagacagcgaagactgattgtgtttgtaaaagcttgatgaaaggacagttaagtattttgatcactgcattttgtttgaaacttgtgtcattgatgtaatttaaaacttttgtttaaagcattacagtatttttctgtgaccatcaattaatgagggtttgtgctaccagagttaaagcatatgctatcattgtattctttaagaaccttattttgataaaatgtaaatttgttgaaccctgccacatttagtatccccacccccaaatcctgttccaatgaaaaaattaaaacctgatacgaaaaaaaaaaaattccagttaacctattttgtgtctgtaggctgacctcaaccctgtaacgtaacccattaaaatgaatttctttttttttaagacagagtttctctctgttgcccaggctggagtgcagtggcgcaatttcagctcactgcaacctctgcctcccaggttcaagtgattctcctgcctcagcctcctgagtagctgggattacaggcacacaccaccacgcccagctaatttttgtatttttagtagaggcggggtttcaccatgctggtcaggatgttctccaactcctgacttcatgatccacccacctcggcctcccaaagtgctgagattacagacgtgagccactgcgtcctgcctaaaatgaattttctagatgattgaataacagtagtcctttgatagaagataatgacttggtttatggccttaatatactacttaattacttaagatgtttattaatagaatgataaatgtacagagtaacctataagcatgacatacttttgctttcagtagtttcatgtaaagaaaaaaacttgaaaatagtaatacctgagtacccatgggaataatagacactggggaggtagggtggggagcgggagcaagagctgaaaaacttacctactggggactgtgctcactacctgggtgacaggatcatacgtaccccaaacctcaacatcacacagtatactcagctaacaaacctgcccatgtgtttcctgaatctaaaataaaaatcgaaataatttttttaaaaaagaaaaagacaatagtattacccatgggacaaaatttgtactattagcaagaatcattttgtgtctcatttagaaacaatttgacttttgttccagtgtttaaactttgacaaaaatggttttgaatagatctttataacctgatgccataaatacaagattctctgataccttcatttaatatatcaatattgggcctaaaacagtattctgtaaagcttaaattggtattaactatgatcatcttgatgtctatgatagataataaacaaggtcatacataccttactaaacaattttggtttttcaccaacattttattctttaaaagatttagactaacagaattatttagcatttcgagtcatgtgctttatttagcaagtgagtaaaaatattggaatattgaagtatttgcataaaaaatcaaatggtggtgttttgtaatctctattgtatttcctattaaggtttcatatattactttcccattgttcctgaatttgttatcctatatataaacagaaacatggatgagtaccatatacttcctgactcctttatcttgttacaccacaagatactgcactatttattggagatattttgatgattagtgccaaggctggcatcatgagccaaaatagacttgttaagtcaacctcattccaaacacctgctatagatcatcaaatctaagttgccattaattgtaagatgtcctgttatttcacacacacaactagaaaagaaaaatcggtatcaattatagtatggtgctttcttattttgaattttacttattagaagagctattttagatgtatttaaacataagatttttatcacataacttgtggatacaaaaaaagagaaattgtaagcaaaataagttgggtaatatattcctaaaacctcatcttctccagtctgagtatttttttgaatccttttttttggttttgttttgttttgagacagggtctcacttcattgcccagcctggagtgcagtggcacaatcacagctcactgcagcctctacttcctgggctcaggtgattgtcctaccttggcctcacaagtagctgggactacaggcatgtgctgccactcccagctaatttttgtatttctttgtagaaatagggcttctccatgtttcccaggttggtcacaaactcctgggctcaagagatccatccacctcaacctcccaaggtgttgggatcacaggcatgagccactgagccctggcccctgaattctttttagtcagaatttctgttgaggtaatgtaaattcacatgcaattgtaagacataatatagagatctctgtacacttggccctgtttccccaaatattaatattttgtaaaactatagtgtatcaccaccaggatattgatattgatacaatccattcaacttatttccccagtttagtattctgtgtatttagatctaaacagtattatcacttgtgttcatacatccaccaccatgaggatccctcacattgctcttttgtaagcacacatacctctctttccccaaatcctgacagccactaacatatcctctatttataaaagttaatcattttaaaatcttatatagtgacatcaccaaaaatagcaaaatggggagctccaaagatctgtccctccactgaagcaaccattgctagcaaaaacttaagatcaactttttggatctctactaataaaaacaacaaccagaggaatgcttaatgaaaaggctatttagctttggtaaaagagtttttgtggttttgcttacgtgcctaccatgccctgtctcccagccaggcaacagctgagaggacagtggcctgtgctcctagtgcatcttgataccagaacgggcaatacagatcttgctctcacagaaatgtgggtgtgctttgacctgcctggcagttcctgaaggttcagctcagagggttgcctttgttttgccccctccacactagaacagcctcacagtgcttatcagaagcattacctgcagccatctggggctggggacggcaaacggggcaagcagcaaacagaccaaaaaacttggaaaggaaataactgggaggaagatacgtgggagagagaaggctcagaagggcccttgtctgtactaggtagtccggaaggccacacacatgcctaacactggacacatttttggaaaagacctgagaggactctaggcctgcacctctgactgatctttaggctccacagaagtaggaggtggaagctaaagcagaatttaggtgacctggctaagcgctgaaggaatgcccaagtcaggacgaatctacaaagcctgggagaattaccatttttaactttttattttattttattttttttaaatagagacatggtctcgctttgttgcctgggcttgtctttaattcctggcctcaagaaatcctcctgcctcaacttttcaaagtgaaacagtatcttttgttcttttggactcatgacagttaaggaaattaagtgaaatgctgtacgtattctttgccatctttcaatcagcatgtttgtacaattcaaattgtagctgtagcttgtttatttttatttctacactaatccactacatgattctattaataatttacgctgttgatgagcgtttgaagtgtaaaaataattgaagaccaaacatgagaaaaacagactttttattcagagcttgcggtagcaaaggaatcagccacgatctcttgtgtttagcagactcagaggcagataggtttatagtggggggaaaggggcaaggttcaggaatgctctgcttggagggtgttggcatgaggaagctggaggctgatcagctcactgcaggtgtcttacaggattgctttggggaacctatttggctttctctgattggtcccatgttggaagagggagcaaaatgttgggatgatggcagtaactgagtaagtcttgaccattctgaatggatcactggggagattgtggtttggcttccaggagtggttgctgcagagggtctgggtgagagttctattgtcacagaagctcgtccattgtccgtgtgtatgcctagtcccagagttgtttccagtttctggctgctagacttttacatttcacaatgaagtgtgattttagaaataatatgaactcttgcctgccagaacaagggccagtgaattttaaaggaaggaagcacaatctagaactcgacagcaagggtcaaccatgaaaagttaggtatgaatattgttaattcctagagcaagaattttttcaaaaatatagatagatagccaatagaatactaaattactctatttggaatactaataaacccagaaacaaaaagtagtgaaacaaaaacaaaatcacagggacaaacagaagaaataaaatggtacacctaaatccaaccacatcaataattatatcaaatgttaacggtctaagccagaaggtgcgtggcaaacttcttctgtaaagagccagatagtacatattttaggctttgcgggccatacagtctgtatactctgcctcaaattagccataggcaatatataaatgagtgggtatggctgtgttccaataaaactatatttacaacaacaaacaggctggatttagccacaggttatagtttcctgacctttgctgtggaattctagagtgtgtttccttcctttaaaattcattggaccttgttctggcaagcagttaaattacttctgaatctgggaacttcttttaattctcttggctttttttccagttttggaagtttccaagtatggaaccacttataaattaacaggttggttttccaagatcagcctggtgatgagaatttgggctacaaatagacaggatagctgactgccaatgacctcttagtcccattcagtgctgcccagttccttgagccttaagggagggtttgaggtgacttctggttcagtctccccctaagagtatagtctttcagtgtcctcatttaattattcccatctcaatgtgtccttgggctttgacttctggcccccttgctgaggaagagaagacaataatggaagtaagaagtataggaccccctttcctccaaggctaagattcagacctcttcaaagagaggaccttcctacacctggaccacagcccacagcggggaagaaactggccagagggcacaggtggtgctaacctggaacagcagcccaggagggtgtggctgggtggaaaggtggcctgggggcaactggaactcatccacatcactccccccctgaataataatgataggaccaggactggaagggaatggtcttcctgtcctttcactccagagaccctccaaagccctctgttggtaaagcttaatgatcattgtgtcaacagatgtttacagagtccagcccatgtccatctatcacaaagcagggcagagaagggtggatttggagctgagagccattatattgataactggcacataaagtgcttttatttttttcaacttactcccaacacacacacacacacacacacacacacacacacacacacgcacgcacgcacaccccttcatatgtcaaaatgacattaagtttcatttaaatgtatcctatattgaaagagcaaaaaaaaaaagtgacagtttgactcaagaaatgcaatggtttatatgacctacaactctcgaaggaaaagagtaataattttgcaatgttttgatgatatttacaagtcataatttaaagagatacataatttttccctttctacgtaagtcctcaaggaactcacatctgttttagcccagatttgtatagtgttttgctttgcatggattatctcatttaattcttgcagaactttgatgaatggtattattaattagcagaatggtagtagtaacaggcaaagtggtattgttaattgcatgtaatagataaggaatcaagcttcagttattttgacttgcccaaaattgatttggtaagtgacagaactttatttgctgatagtccacaattaaaacttttcattattcaggtagaattcttttcccttttattctatacatgttgatatgcttgttataaagaagcctaggcctgtgatctcgatacccgtggagctctgcagctgcagcagatagtagaatgtatgggaattcacccaaatgcacctacagtagaagtattattcattatttcagagatgctttttcctctgtgtctggttatagatcagttggcatggcatcaagcaggttgatgttcctcttatcccaagccccaagccttactttttcttttttttgtttttgtttttttgagacagtctcacactgtcgcccaggctggactgcagtggcacgatctctgctcactgcaccctctgactgctggattcaagtgattctcctcctcagcctcccaagtaactgggaccacaggtgcttgccaccacacccagctaatttttttgtatttttagtggagacagggtcttgccatgttgcccaggctggtcttgaactcctggcctcaagccatcgtctcacctcggcctcccaaagtgctgggattacaggcatgagccaccacgcccagccattccagccctttttacttttaccaagtggttaccacaacaactttgatgagctgttattcaaaggaatcctgtgatgagcaattttgaaaagaaaaatgatctctgtattatatatttggaattttgaataggaagtaggttaaacatgtgtttaacacttaacacatcccaggggcctctcaattgtggcacagtgtgacccctacatgctgtatgtgtatgaagcacagcagaagcacagaggcaaaacacacctcagtcggcttcccttgagttcccttttaaagagtcttttctatatttctggatcattcctttcttttttatgttttttttggttttgttttgttttgagacagggtcttgctctgtcacccaggttggagtgcagtggtgcaatgactcactgcaacctctgcctcctggactcaagcaatccacccaccttggcctccccgagtgctgggattacaggagtgagccaccatgcccagctttttaattttttttttttgaaacctattacagtaactccctgagatgaagatgagacgtttagcttcctcacactccctcctcctcctccttccccatgcacctcccatgctttgttcaatgttactctccttttacttgcttaaggtactctttcttatgccattgactttagacggaattccttggctttactgagtaagatggggaaattagaaatctgcagtc

SEQ ID NO: 310 - DNA, 79708 bp, Homo sapiens
atacttgatatatttattggagcctcttcaaggtgtggcattatctttttatctcccattccatggaacttcaaattgtgccaagtatcttaaggagaaaactggccctttgtcaagcttagttctctgctcctcccttctcaatgggatcttgcctccacttctgtttttccagccctgagactgccatcagttcggctggcttctctgtaagccagcagtgaccctctgctcaggtaaagccagattccccctggccatgtgccgagtggttcatctttaactgtcctggctctcccttcacttactcatacatttgaaaggaaataggatctatgagcgcagagatcacttttttcttgtccaacattctaacacaaggttggaaaatactgtctgctatagtattgggctcaaaaaatcaaacagatcaataaatgcacacaaatgtctcaaaagtgggttgagcaatctcctatgcaggcctatggacaaaaaccaaataaagtccagaggtgatcattccttctaaggttaattattcacctaaaactaacacagcctaaatccaatagcagccactgtgcccccgaccctagattagatcaaactctgaaaacttcgtgtgtactgggacaaagtgatattgcaaagataggacatccaaagtgctaaagtcatttctgtgctttggtacaggctctcataaatagcaaagcagaaggttagatgcttgtatggtggaaaacagttttaaaacttcacggcaaagatggtctttggaaaacttgggatttatagatttattagtgtgtaccaggcattgtactaagtgcttcccaaatgttaaatgatagtaaccccataaggctattgccatcctctttttgtacagagagacagtgaagcacagaaaggttaaccagtgacttgcccaaggtcaggtagctagtaggtgtccaagctggcattcaaactaggcagcctgcttccatagtccatgctgtttctcatgtggcctctgacatttgtctctggagcaatttcacactttcccctttccaaggcatcttgaagtaataacggcatggggcaccatgtttgtttaaactgtttccaagttcagaattggttggatttaactgtcctggctctcccttcacttattcatacatttgaaaggaaatagggtctatgagggcagagatcaaattttcttgcccaacattctaatataaggttggaaaatagtgtctcacaaatagcactaactgctataatagcaaagctccaaaatcttaatggtttaacacaataggagttgacctcttagtaacataaagcccatctggcagcaatcgtggtgatttgttagggtgggagtggggagttcactttcatagctccattcagtcattcagagatccaggctgagagaggttctgccattttcaacacatggcttccaagattgctctgtgtgttgatattcaaatgacagaataaggaagagcgtggaaggtagtgcaagaaatttccttggatcaagctcggatgtgacaaacatcacttctacctatattctattggccataactcagtcccatgaccccaccaattgtaaagaggatgggaaccatagtctctggctaggaaactacttctcagcaacagcaaaacactatgaaaggggagcacatgtctggggtcttttgtcttagtttgagcagacccagaaaacagacttttagacaagccttctcagatgttttatttgacaagtaaagaaacacaggcaagacagtagagatgtggctgggcacggtggcttatgcttgcaatcccagcactttgggaggcctaggtgggtggatcgcctgaggtcaggagtttgagaccagcctggccaatatagtgaaaccccgtctctactaaaaatacaaaaaattagccaggtgtggtcgcaggcacctgtaatcccagctactcgggaggtcaaggcaagaaaatcgcttgaacccgggaggcggaggttgcagtgaactgagatcgcgccattgcactccaccctggacaacagagcaaaactccgtctcagaaaaaaaaagaaaaaagaaaatagagatgtgagacagggagaaaggcatccaaagaatgtgttaacaagtcagatgccactgtggacactgggacttaattcccctgaggaaactatgagagtcagagtggatgtcccatccacgggacatgcaaacaagggtttttgtgcaccaactcctgtcagccatcatttaaggggtttttttccctataggtcataaatcctctagccctctggcctactgtgcaggtggcagagcagattcctggtgccagagaatgccttcatgcaatgaacacagatgctggcagctggaagtttcctaatgtgcatgagtgctaagggtgagggggtatgggtgggacactaagggtttctacatggtctctgccagaatccagacatgtttttttccctccctgcccaagcacacatctgctacacactggggaatggggaggcacaaacagaataacaacaataaaactccctttcagaaaagggaggagtggagacccatagccatcattggtcagtatcaattttgaagttgggcaggcactaggaggctctcgattgggggttctgattagatcagattctgttctgtgacaggagctcctttgctcgttgctctccaggatccctggtacctccttctgggaggatcttcattttctattaccctctctatccatatctgaatactgaggagtttgtgctccttggggctgtatgactttccacctacttgtgctgcgaaaatttgaggattaaatcaaagtctgaatactccaggtttctggttgggttcagaaagcaattatctcaaaatgttcgtaaccttcagatctatttggttccagtcagtttcacgtggtaattgtcaacctcacacatacaaaacaaggtcaagggtagggcctgattccaccagtgaacatacttgagacatttttagatttagatggtttattacttccatagatagcaacagagaagaataagtgaaagatgtcttctccctgggtctgatgattgcaatgcgagttgtaggatactctattactaaggagtcaaatctagatggcagctagtgcttttatattctgcaggcctatcatgaggggagtggggcagaaagccccatatctcatcaaaacctgggaggtgatgagaaactatgtcatgacagcctcttaggagagatagaaaggtgagtgagagatgcctttctagtagctccttagacacctcccttaaggatgacaaggtgttgtgccagggctcagataagttgcaattcaagcctttgcctctattgatatgtgtaagcttatcaatagaggaagtcatggcagagctgttcttctacagaagtagtcccctccctagttctttcctagacataattttcaaacctgattgctatctttggccccatacctctctctctctctctcagttgatggtgcctacctagcttgggtgacaggaccatattctttaactagatcttttccacatggtcgggttgtaatggacatttgttgctcaaaacctttctcaggtttatctcttgtttttaggacacagatgaagtcagcttttccaaccttgcaaaatctcacatacttgggtttttttttttttttttgagtcagagtcttgctctgtcactcaggctagagtgcaatagtgagatcatagctcactgtaacctcaaactcctgggctcaagcaatcctcccacctcagcctcccagtacctgggactacaggtgtgtgtcctccacactcagttaattttaaaaaaaaacaacaaaacttttttttagagacaagatctggctgtgtcgcccaagctggtcttgaattcttggcctcaagcaattctcctgcctcagccttccaaagtgctaggattacaggtgtgagccactgcatccggcctggatttttttttttttctttttctgagacagtgtctcgctctgctgcccaggttggagtgcagtggcacgatctcagctcactgcaagctccacctcccaggttcacgccattgtcctgcctcagcctcccgagtagctgggactacaggcgcccgccaccacgcctggctaattttttgtatttttagtagagacgaggtttcactgtgttagccaggatggtctcgatcttctgacctcatgatctacctgcctcagcctcccaaaatgctgggattacaggcatgagccaccatgcctggccaggcctgaatttttaaattctctttatttttgtttgcaaacaggccaattccctgagcttgtcttttgcttatctaattaaatgcagccagtagcaacccacatagaatagaatgtgctaatgacattctattttacctcctctttgctagaggagacttagtaggcctatgttctatcttccaggttactgaagacaatagtttaaacaaatgttttgctaatcagactatttctgtagcgataatatcatttgctaatttcacttctaaattgtacattcaaggccgggtgcggtggctcatacctgtaatcccagcactttgggaggtcgaggtgggtgaatcacaagatcaggagttcaagaccagcctggccaatatggtgaaaccccatctctactaaaaatacaaaaattagccaggcatggtggcacatgcctgtagtcccagccactcaagaggctgaggcagaagaatcgcttgaacccaggaggcggaggttgcagtgagccgagatcatgccactgcactctaacctgggcgacagagcgagactccatctcaaaacaaaaaccaaagcaaattgtacattcatttatttatacgtatttattcatttacagcattggaaacaaacataaaactctataactcaaaaaacctatttttagtttggctttaattttgagaaatattatctatgtagtaaaatataataataaatattcatattcccaccacccacattgtaaaagtaactattttgtcatatttgtttcctgtgttttctttcccgttctttttttttttttttttttgagatggagtttcgctctttttgcccaggctggagtgcaatggtgcaatctcggctcaccacaacctccgcctcctgggttcaagcaattctcctatctcatcctcccgagtacaggcgcctgccaccatgcctggctaattttttttatttttagtagagatgggtttcttcatgttggtcaggctggtctcgaactcccgatctcagatgatctgcccacctcggcctcccaaagtgctgggattacaggcatgagccaccactcccggcctccttttccattctataaacagataaagttgcccataatgtcaccccaagcagggtctggagagactggctctaggtgacagaagtgccagagaaacaggaaactgatcctaaatgccaggaaagtgagggaaaagttaattccctaccccaactacatttttttttctttttcttttttcttttttttttttttgagatagggtctcactctgttatcccaggctggaatgcagtggcatgatcatgactcaccacagccttgacctcctaggctcaggtgatcctcccacctcagcctcctgagtagctgagactacagatgcccgccaccacgttcagctcatttttgtattttttgtagagatgaggtttcaccatgttgcccaggttggtctcaaagtctggggctcaagcaatctgcccaccttggccttccaaagtactaggattacagatgtgagccatagcacccggtccccagcttcttttttaaaaaagtttgtaaatattagagatgggggttcttgctacgttgcctaggctggtctcgaactctcagcctcaagtgatcctccagcctgggcctcctaaagtactagaattacaggcgagagtcaccacgaccggcaaatatggaatgcttcacaaatttgcatgtcatccttgcacatgggcaatgcttatctctgtatcattccatttttttttcagtaaacatgctgccaaagtaagcaccgaaacctcagcttccgagggcatatcataacctttccctgttttcaccaaagtcttcagggaccacaaacccatatacagttagttccttgtatctgtgggttccacatctgaggaggtcaaccaaccggggatcaaaaatattcagaaaaaaaatacaatttttatgtaaaatttgccatagtagaaaaaatacaacaataaaaaaacaaaatttaaaaatacagtataacaaacgtttacatagtatttacatagcatcaggtattataagtaacctagtgattatttaaagtacatgggagtggccaggcgcagtgacttatgcctgtaatcccagcactttgggaggctgagtcaggtggatcacgaggtcaggagttaaagaccagcctggccaacaaggtgaaacccgtctccactaaaaatgcaaaaattagccgggtgcgatggcagacgcctgtaaccccagctacttgggaggctgaggcaggagaatcgcttgaaccccgggggtggaggttgcagtgagcagacattgtgccaactgcactccaacctggacaacagtgagactccgtctcaaaaaaaagaaaaaaaaagtacatgggagtatgtgcacaggttatatataaggtacttgagcatcttcagattttgttatctgtagggggccttggaatcaatcctccgtggatactaaccatttcaccctttcctgaaggactgctgttcaagcaaactttaatgtgtaccaaaatcacctgaagggcacagattgctagccctaccccaagtgctcctgacttaataagtctgaagtggagcccaagaattttcattcccccaaaattcccaggagatgccgatgctgctggtccagacactacacatcagaaccactgctttatccattttccaggagtagatactagagacagaccctctctgcttatctggagacacaagatgggagaacttgccccctagtggtgaactcttactctaaagacaggtcactcctctggtatcaagttccggctgggtaaaagctaaagggtgcattttcttcatcttcattagcagcatctatgaatctccttctcttgtgaggtctctacttggcccagaaatgccaggaatgggctccctccccggtgtggaacttcacacagagatgggcagacagcacgtgcccaggagcagtgtggtgtgtcaggaaaggcacgggcaagtgacacagtccctgaacttcactttccccatctccataacatgagacaatgatacccatctattatagggttgctgaaaagagtaaacgggaatagtgtgagcaggagtcccatgttaactgtaaagtgccctagaaatattaattgttattacagattcaggtcagatttgcaccttaacaattaactgtggtttcttttttttcccacctctagtgatttttgtttttttgcttttaaggctttcttcacccttcccccagcaataggcctttacctttgagccccagtgttaattgattctgactcatttctggtaaaaaaaaaaaaaaaaaaaaattaatgatatttattaaagcacagtaagacagattttattccggaccatcaggataggtatagcaaccatggcaatgggattctgaattaggagagagagagtgggctcaactctaaatacaccatgggcaagtgggaatttatagccaaggaacaaaaagcttggggtcactggataaaaaattactaagaaggaacttcaggagtaaaggggtttcttgctgaaaataggtcaaggtgatcagacatcaccttggatggtagaggatgaggaacctgatcagatattgagggtagagggttctaactggattttccaaggaaatgcacagataaacctacgagaaggttgaggagtctgactaaagtttggccaagcaaagaatctttgtcaccttccatcggtgtattcaaaaacttaagactcaagctgctcattactatctttaggctctaaaaagaaaagaaaaacaaaaacaatcaagggacatggcattatacttttacattagtaaatccaaagtcattttctcaatctcagcagtgaataataaaatgatcctcattagtatagtggctagattttataaaataagaaaaaatttttttaaaaaagaataaaatgaaaagaagcaacaacgaatcagttttccgctggttatcactaaggtttgcaggcccatcttatcccctctccctttgctctctgccatctgaatcttaggttcagtcccagaatctccccagtactgaggcagatgcagagaaagagaacggcgatgtccactgaaggggaggaggaggggagaccattgaagatcttgacaaagatccctttgcattagctgtgtaataagtcatcctttcttcccttgccatcttgtggctgtgttaggcggtgattctattcctgctgtgttggagggaaaccacccagtccgtagtcagaagacctggatgcagtattaattctaccacctactagccgtgtgcccttgaacccatcatttaacttcctccgtttttacatctacaaaatggaactaccactatttgcctcacggaattgttttggataataccttttcccgtgcatgcctggtataagacaggtgtaaaataaatatctattgaggaaatcctttctttccctggcttttttaacagtaaaggagtattcctggcctgtggtcctacctcttgaaccgacggcgctgggcctactcgcagcggagactaggcccgcccagcaaagccctaaacccaaagggtccggcccaagctttccctgaagccccaccgcccacagactgctcacctccacgtttgacatttccgctcttctgctgcagctgccgatggcgtcacttccaccggaaaaggcaagcgcggccgcgcggttggcgcgaaagtcggttcccgttctgggcaatttccgggttctccagcgtttgctttggggtaggggcggcgccgagtcgggggagggggctgtgcgccgggctggcgcccgaccccagccaccgccctgcggccagcgcgtcccccgactcgccgcccggagaccccgaggctccaacgaggtaagtgaggcgcggagtggggacacagctcctccccagccccaactggggttcgcgatgccttctgtggccttcaggaccctcttttcctgtcctggtaactggccctggagccggcgggtgggcctttgacgccgagaggacgtggcttccgtgatcccagagccaggccttttcctggagatgggaaccggagcatctagccttatgcagggccaagaccatgctaactggcttccatgtttatatttaaaatctgtttactgagggatgaacgtacctcgcaggccgtgggtatccgcagggacagatacactctgtgtatccttaaaacaagtgcaattgaatgtccattggcctaaagggcttagagccttcatagcagggccttcctcagtgtattcaattcgggttaattttgctgtctgatttgcaaggattggtgttgtcatcttttaccttggctttgtccaagttccaggatttcttagaaatgccgttgacgaattcacgggcagagccagaatgtctgtctttaggcattcttgtctgcacagaaaaataggtaggttaaacatgcaactttttatctaatgtggttttgttcttgttaatggttcctttattttgacagttcagaaatgtccagaaatgacaaagaaccgttttttgtgaagtttttaaagtcttcagacaattccaaatgtttttttaaagctctcgaggtaagagttgaaaacatcttaataccgtgaattcattttcttgtttttaagtgtttttgatttgttgggctttatgtcttagaagtagatatttcactttcataataattttatagtctacattaatacagatatatcattatcacatatttttgaattgatctaagtacatcattatgtatttcggggggctggaagtctattatcacattgctgtttaatatggctgacctacagttcttggaaattaagttgctttcatttgtctcctagccagagtggtcctttgcgtgctgtagaaatttgagtcagttgtgtactggtcatacttgaaaattttttggttaattgttaaaaattatgttttattatgtacagtataataattggatgatagtaggggtgatgtagatccttgcttctcacagaacccagcagtatcagcatggcctggaagtttcttcgaaatgcagaatcttggcctccaacccagacttagaatctgcatttctaacaagatcttcagtgtgcattaaagtttgagaagcatttgtagcagatttttttaaacttcattcattcagcaagtatttattgaagtgttcatgatttgataggcacttctctagtacttgggatttatcagtgatgagaacaggcaaagatttctgttctttcagagcttacattctagcaggaggacatagacactaatcagacatgataaattaggaagagaaaaaagcaaaacacgttaaggggttccagaggatgtttcttggggtgggaagagaagggggttataatcttaaatagggtgtgatcagggtaggctttatgaagaaaaagatattgagtaaacgtgaaggaggtgagatagccttgcagatatctggagaagaatgttgcaggcagagagagcaaccttatacagcccctgggaaagtgcctgtagtctctatccaagtttagtgtactgttgtgtagtgagtgagggatgggggaagagtactaaggaatgcgttagagaataatggtaaagaggtcatgtagggccttgtgggccatttttctctcagtggagagccattggagggttgataatcagaagagtaaacatgatctgacttacagttttaaagggattactgtatttaacataaggacctcaaaattggttcagaacatttctgagtgcttactgggtgtcaggatatagtagcaaacaagatacatagaaacttccaggggagagagacaaaaactatatatatatatataaatacgtatttttaaatagaatagactagaagggtagaggaagggtatttgagaaagcctgattaggatgggcatctctggggaggtgacatttaagcagacctgattgaagtgggggattaagtcaggtgaaaacctggaaaaaaagtattctgtgctgcaagatcaagagcagagcctctaaatgaggttatggttggcttgttccagggttggcaagaaagcgggagtggctggaatagaataagcaagagagatgagaagtaggaggtaaaggtggaaagataggcaggaaaccagactgtgttgtcttgaaggctgtagtaagaaatgtggattttattctgggtgtggtgtgaagacattaggttttgagcagatagtgacatgatctgacttgtgtttttgaaaagattattagctgctgtgtagagaacagatttagggcaaggaagggaaaaagagaccacttgggagccttctgcagaggtctaagtgagatgtgatggtggctttcaatagggaaaaggctggatttgagatggaatttgaataggacctaaatacaggagagtaatttcaggtacattcttattttattttttctttcagtccataaaagaattccaatcagaagaatatcttcagattattacagaagaagaggcattgaagataaaggagaatgatagatcactttatatctgtgacccttttagtggcgttgtctttgatcacctcaaaaaggtttgctgacttctagtgtgtacctttggtagtctattttttggtttatctttgctttaatggacatacattctttgcggattataaagtactatgcaacttatgagtacattggaattcttttggtttggcaagaccaggattgaaaggctaattatgttacagtaggctttttttgtttgtttgtttgtttttgtttttgttttttggagacagagtcttgttctgttgcccaggctttagtgcagtggcacaagctcagcccactgcaacttctgcttccttggttcaagtgattcttgtgccttagcctcctgagtagctgggattacagatgtatatacacacccggctgatttttttatttttagtagagaaagggtttctcgatgttggccaggctgggctggtcttgaactcctgcactcaagtgatcctcccacctcagcctcccaaaatattgggcttatagatgtaagcagtaaggcagttttcagtgaaaggggcttttgaagtttatttcttttcttttctttttttttttcttttgttatagggtctcactctgtcgcccaggctggagtgcagtgacgtgatctcagctcactgcaacctccgcctcctgggttcaagcaattctcttgcctcagcctccctagagactgggactgcaggtgcccgccactgcacccgactaatttttgtatttttagtagagacggggtttcaccatgttggccaggctggtctcgaactcctgacctcaggtgatccacccccgctcggcctcctctgaagtgctggcattacaggcgtgagccactgtgcctggcctgaagtttatttcttttgatagcttgcattgtttgatttgcttttgtgtgtgagtgtttaatgtatagtatctctgagaaattatatagtcatctttatttttttcttgtaatgatttgctgatttctctacagtggtcatcaactttggtaaagaattggtgaatgttacaaaatgtaattttgtaagactggtggtcttttccttcttaactcatttaaacttttctcttttttgtagcttggctgcagaattgttggtcctcaagtagtcatattttgtatgcaccaccagcgatgtgtcccaagagccgaacatccagtttataatatggttatgtctgatgtaaccatatcttgtacaagtctggaaaaagaaaaaagggtagatattgatctcatgatgattgatcaatttatatatctatctcttattcttaatttttcactgcatagaagatagcttaaaagactttccgcttattgttcgtgacttttaacaaagttcagtatacaaccacagtgtgtatatatgtatacatgtacattttttaagtaaattgaatatagtagaatttgttttgttgaaaactggctaattgaaattttttgttttaatttaaaaggacactcattttttaatcacttacatttttccactataggtggacagtctttaaaaaaaaggattctaaatcgtttgaatcagggaggtggaggttgcagtgagccaacatcacgccactgcactgcagcctgggtgacagagcaagatttcgttttggaaaaaaaaaaaaaaaagcattctaagagagagctatagaaatacatatatatatttgggacagggtcttactgtcacccacgctggagtgcagtggcacaatcacaactcactgcaaccttgatttcctgggctcaagtaatcttcatgcctcagcctcccgagtagctggaattacaggcatgcaccaccaagcctggctaaaaataaatatttatatattatatagatataatttatgttgttaaaaatacacatgtatatttatatagaagcaaagattaagatttatacatcctttgtataatagtttaatacattcatggagttgaaagggataaatataggaaaataatattttaaaaatataattcatacttatctcccaaaaaataatttggttaattatttaactttataatgttatgtaacacttatgtattcaaactgtcaacagcaaaatgtatttatgagatagtgtataaaagtggaagcaatattgtttgcttcagcattaatgtgttctcttttggggctgcaggaagaagttcataaatatgtacaaatgatgggcggacgagtatacagagaccttaatgtatcagtaactcaccttattgcaggagaagttggtagcaaaaaatatttagttgctgcaaacctgaagaaacctattttgcttccctcttggataaaaacactttgggagaagtcacaagagaagtaagaaagacatttttatattttctagatttgaaaaaatgatgcattcaatcatttttggcatgtgatatactctttggacttactattcagggaaaaaaatagtgtcattactcttttctccagcgaaaacggaagagcagaatctacaagctcttattaccaagatataagttgacaggcatagaatgggccaagggtttagcattagctacagagtaggaaatgctttggtgataaagttctcagctgtaaatatttctgaaataattgagaaaacgagtttggcaattctgtagcttttatgttgcattatccttcaacaccattcccatatgttaagatagataataaattagtcattttggcagttgcattccttccaaaagatggcatatgtaaggttgaatataaacatatgcaagtcatcagctgagatgtgatcatttaataaatgctaattgagcccattttacgtatctgacttgaggtaggcattaggtatatgtagtaagcaaaacaagatagtcacttccctcatggagcttagagcctatttcaaggggcacacttcagtttcccctgcaactagataaacaaccacaagaccaaacaccacagaattgtattggcatacgaattatatcggcacttttctgggcttgttttcaacaccatccagcatatcccaaatatgtctccatgtcagcaactctcattcccaatgtgattacttcatcagcacacctccctagcatggcaacagaataatgatatttttgttggtattttgccaaaaatcattgcttttacttgtatagaataatggaaagattaaaaagttcatttatctaataggcaaccaaattacctttgggtttttaagtagagattcagacttatcattttggaaaatatactatgaccagcaagggctagagttaaggaaatatatatttttcccttaaaatggttttgagagactgtatctgaaacaattactttgttttagagacatgttattgaactaggtgaacaattagtgtaattctgttttggtggttctcctttgtaaaaaaaagattataaatcctaaaaaatgagggaagcaatagtgatatttgtgttgtttttcattattcttctggtaaatttaatatgttcttttttaaccatttgattcccacagaaaaataactagatatactgatataaacatggaagatttcaagtgtcctatttttcttggttgcataatctgtgtgactggcttatgtggcttagacaggaaagaagttcagcaactcacagttaagcatggaggtcaatacatgggacaattgaaaatgaatgaatgtacacacctcattgtgcaagaaccaaaaggtaaaactgtgtttcacaaagggacaaatgaaacattttctctagtatttaatattttatttttatttatttatttatttattttgagacagagtcttgctctattgcccaggctggagggcagtggcacaatctcagctcactgcaacctctgcctcccttgatcaagcgattctcccaactcagcttcccgagtagcgggattacaggcacctgccaccacgcctgaataactttttatttttagtagagacgggctttcaccatgttggccagactggtctctaactgacctcaattgatcttcccacctcaacctcccaaagtcctgggattacaggcatgagccaccgtgcccagccactaatatttaatattttaaaatctttacagaacagcttttacttctgacatgtcattaatctagtttgatactgttttctctaacatcttgcaaagatgttttctctaacatcttgcaaagttttaactggaagacacaccttgcggcacatgaggcagtaaaaaatgaaaaagacattacgaacaagaaaaattctttaaaattgctattaagtttggtgttacataacattattctggataattttttatcagcactcttaaaatatacacaaattgataaaagatgagttttgttaatgtttttattattgccctttatatgtatactgtgttttactaagctatctagattgagaagaaattacgattaaatggtaattgtccttaagtcagaactttgagtatggctgattgtgataggatcactgtgagtagagttgatactgctgttctttttctgaatctgaagacagttcattgttgattctctcaagaatgccaaaaaacctttcatgtgacatattgacctcaattcctctgtgatactgcttcaaaatacattgtgttgaagatttttaaggtaataaaagatacatattttcaatataatttatcttttggcttatctatcctggactttaagtagaagcctgttgacattggaatagtctgttcaaagttgggatttattatatagcacaaatttacaattttcacattgtacaagctggtttaaagaaattaagtgatggagcctatatgcaaacccaagtccaatattaattaagttaccccacagttgcttctgtcttcctgcagtttgtataaaagataaaacctctcacatggcatatgtatttatactacacatagaaaatataattaggcaataagctaaaatactactttgtaataaactgtgtagcatactgtttaagagtaagtactggtaactttaattttgttgataggtttttgaaataacctgttatagccgggcgcggttgctcacgcttgtaatcccagcattttgggaggccaaggcaggcgaatcacctgaggtcaggagtttgagaccagcctagccaacatggtgaaaccccgtgtctactaaaaatacaaaaaaattagccagacatggtggcacacgtctgtaatcctagctattcaggaggctgaggcaggagaatcgcttgatcaggagggaggtggaggttgcagtgagccaagatctcaccactgtactccagcctgggcaacagagtgagactccatctcaaaaaaaaaaaaaaaatattaacctgttataatttgaatatttctgcaaagatagattgtaatggttttcatttcttggtttctcctattttctctatttctttcttaatgaacgccacaggtcagaagtatgagtgtgccaagagatggaatgtacactgtgtgaccacacagtggttttttgacagtattgagaaaggtttttgtcaggatgaatccatatacaagacagaacctagaccagaagcaaagactatgcccaattcttcaactcctaccagccagatcaacacaattgatagtgagtctcattgagattaaaataattattctgaagacagtcatatttctatgtaataatcagtatgttaataggatcactgagatagggaatttctttttcttgtttgctgtgcttctaggcataattgtataatagtcaaattgtataaaaagttagcactgaactgttcgtaattttcttttagaatgaatgaatgctgtcttttatactctgttgtaatgcaaaagatgatcaaagaaattaagaacaatggtagctgggggcttaagataaaagtattaatcttttaaacattacatgcatatattaatctttccttaatttacagttttgctgcagttatagatcatctgtatttgtataaaaattaaaaccatttctattttgtaggtgtcgtgttggcaaaatgtttaaaatattttttcaaatgtaagcttcttggaccttaaagtcagcaacttcagatttttatgggaaacaagacactattaagaaaatgtgttaaatctattttcatttaaataagataggaggcttaattaatttcattttccctttttatactttgccactaagatttcagtaaacacccctgaatcttactttggaagttgtttattgccctatatttgtaagaaaagttaatccatagacaatatgtaatcatgattattttatctcccataaatttatacgttttcaaaatatgtaggtcgtactctttcagatgtcagcaatatttccaacataaatgcaagttgcgtaagtgaatcaatatgtaattcacttaacagcaaactggagcctacacttgaaaatctagaaaatctggatgtcagtgcatttcaagcacctgaagatttattagatggttgtcgggtacgtctttattatataatacatgcagtagatgatatacattagcatttcctagcctgactttgaagacccttcagagttgggcttgctccttactatctatgtaaaccctccactctagctaagtagatgcacttactagaccatgtccatcctttggctgcgagagtccctctgcctgcaaggtatcttcctctgttatcttttaaaagttcatttcaggttttaactcttctctgaaccctcctaactacattaatcttttcatctgctatatttcgagagcacttagtttctgaacaacttattggattttttttttttaatttttttgagttagggtctcactctgttgcccaggctgggatgcagtggcacaatcataacttcctgtaaccttgaactcctgggcatcagccacccctcagtctcccgagcagttagaactacaggcatgtgccactacacctggctaatttttaaaatttttttgtagagacaaggtctcactatgttgcccaggtttggactttaaactatcatccaagtgtttacagtgtattagacactgtgctaatcattttatgtgtgttaatatatatataaaatcgcatttaagtcccacaaataactctaaaatggatattatcttgagggtaagacttagagaattaaaattcttgttcagagtcacacagagagacattaagtggccagttatctactccaaagtctgtattcctcaccattagagccactgctttgtttggtatttcttgggttatttagttttttagtatatgaataactgtcttataagtttgttgatggaaacagcatatgctatactttttccgctgtcttagattggaatacttaatgtattcctatttgtagaatgacttggctgtgcactaattttcacagagtagcaaaaatttaaccctaccttattgttaagaagggaaattggagctgggcttggtggctcatgcctgtaatcccagcacttttgggaggccaaggtgggcagatacctgaggtcaggagttggagaccagcctggccaacatggtgaaaccctgtctctactaaaaatacaaaaaaaattagctgggcgttgtggcaggcccctgtaatcccagctgcttgggaggctgaggtaggagaatcacttgaacccaggaggcggaggttacagtgagccgagattgcgccattgcactccggcctggtcaacaagagtgaaactccatctcaaaatttaaaaaaaaaaaaaaaaaaaaaaaaagggaaattcggcaaattaccttttttttttttaaacttgccaacttacaaaaggtgggttttttgtttttgttttgagacggagacttgctctgtcgcccaggctggagtgcagtggcgtgatctcagctcactgcaacatcttcctcttaggttcaagcgattctcctgcctcagcctcctaagtagttgggattacaggtgcatgctaatttttctatttttagtagaggtgagggtttcaccatattggccaggctggtcttgaacttctgacctcaagcagtctgcccaccttggcctcccagagtgttgggattacaggcatgagccaccacacctggctcagaggtgttttgtatgatgttttatcctagactactaattctagatatagcttttaattatttcttacatatagaaagtatatgattccaaatatttgttaaaatatattctagtaatgggggtgatttaatttggggtataaatgcagtttggagtagatttgtcatacttaaatttttttaagggcaccttatgtaaaatagaggtaaaatgattttatattgattaaattggtttaaatatatatatactgatagctaaaaataaattactgcatacatgttatcctcaaagcattgtgttcagttctttgacttatatatattttttgttcagtcaactctgtgagtaaggtaacatcaatttataggtaagaaaattgatttaaagagcgtaagcaacttgcctattgtcgttaatcataggcagctggaaaaaacaacccctccccccgccccccacacacacacaatttaagcccaggtgttcagaattcagacagttaactacagtttacttttataattactttaaaatttacaagtaagcttcacagttaaagaagttacctgcattttaggaattggtatgcactaatatttagaagatgttggactctggcttctattttctttatagccacaaaatacttatcaagtatctactgtgaaagataatgctgtatgagattgtaaagagtgattaaaaactcaaagttgcagaactgttaaaaaatcaaaagtttcagaatgtatttattcatatatcttaaatgtacacaagttgtcttatttatacacagtggatttagatatatatttttagtttttttctattgagagaaagcatgttatgtatattaaatattttctttcttgcagatatatctttgcggttttagtggcagaaagctagataaactgagaagacttattaacagtggaggtggagttcgttttaaccagctaaatgaagatgtaactcatgttattgtgggagattatgatgatgaattgaagcagttttggaataaatcagcccacaggtttttttcgtttttaattcaaagcaatttctactacataatttttcttaaaattgcatatccacgcagttctggaaactgcatgacaagtgggatgatggtctttatagcttgcactaatacataactatgtgctatttttgtaggcctcatgtagtgggagcaaagtggttgctagagtgtttcagtaaaggttatatgctttctgaagaaccatatatccatgctaattaccagccagtggaaattccagtttcacataagcctgaaagtaaagcagctcttttaaaaaagaagaacagcagcttctctaagaaagactttgctcctagtgaaaagcatgagcaagctgatgaagatctgctctctcaatatgaaaatggtagctccacagtaggtaagaaatgcttgattagtatttgtagttagtaagaaatattttagtagcctaatacgtacatatgtgatttctgccaagttttctagattttaagttaaattaacctttttctttccttaaaattttcctcataactttttttctgagcaggcaagacaagagggtcctgaaccctttaaccctctctcctgtctccagctaactagctctattttgatttgttatatatacaggcattgcttggtttgtgtgtgagtttgtaatatcatgagccttttattaaaaccttgtaacaaatacctcttactggattattgtggtctttaatgcatgaaactgtactgtggactaccacctcagtatgtactcttatcatgtagtaaggtaaattgccagtgaagcattataaacatcattacttcttttttattaaaaaaaagcctttataaaatacctaatatagccaaaaatatatacatttaagtaaatttaatgtgtatcataacttaaaatctgaagttaatcagaattttaatctacctcgaataaaacaagaaccttagaaaactttttttttttttgaagcaggatttcgctcttgttgcgcaggctggagtgtagtggcatgatctcagctcactgcaacctctgcctcccaggttcaagtgattctttctgcctcagcctcccaagtagctgggattacaggcatgcgccaccacccctggctaattttgtatttttagtagagatggggtttctcagtgttggccaggctggtcttgaactcccgacctcaggtgatccacccgccttggcctcccaaagtgctgggattacgggcgtgagccactgagcccagcctaaaatactttaatgatcacaactagccctgctccctctctccactcatcaacatactcagcttatgtgattttgtctagtattttcattatcttttaacatcttacaattaggcgttattatgcttttatatggtcagtatttgtttcatttactaacacgtttaactgtttctttgctctccccagttctttttacatctgagacctctcttttggaatcattttctttcttcctaaaacaatatcctttagaaactcctttagtttctctaagactcttcggctgggtatacagttctagacagtttctttaagcacagagatattgtttcattgtcatctatttccctgactgctggataggaggtcagatatcagtctgtcattcctttacagataatctgtctttatcctctggctgtttttaagatagtcttccttttggtttttgtgtcctagagctttaccatttatttgtcctgcttgagattcactgtgccttctgaatctgagaattagtagattttttgctttttgttaggtcaagaaatgtttattatctctttgaatattgcctctcccccattctctatattctcttaactcccatttgctttgcatataggtcacttaacctgtccttatcttccatctttttgtctttctgtgatttattatgtgtaattccttcagatttttttccagatcacgaatcatctcttccgctattgcctaatctgttttacccatccattaaattttctgttttaataattaatttttcaattcctagaagttttagctttttaaatagtctgtcatttatttttttacttttaaaaatagagatggggtgctactatgttacccaggctggtcttgaagcacctcagcctcccaaagtgctgggattgcaggtgtgagccaccacacccagccaagtctgtcattttgtatttgtattttttgttctttatttcttaaaacacattaaacctatcaaaacatctgtgaattgttctgttggctgttgtttatggtgcctggttttcttgtgttttgtgatttttattgtgaacttgtacttactaggactctaggaattctaagaaacttggggtaggggtttgttaccccagaaaaggttcatgtttgggtctgctaggtgcctaggagtttacaaactcaatatgcctttaagttggtgtattggctggaggtttcttagacctccagctatatgaatttatacccaaacctactttgaggaccagcctctgatgaacagattcttaggagagatgttgtttccccttgacacaaagccagtgttcttgacctcttcctttacagggcagatttgttgttggttggttggttagttttggtctgtttactaaagatatgtctcttcatgggttctgggcttgttctctcagggtatactctccttcacctctaagttttatgaaaccaaaggattggctcctatctcttgtgtgatacctttacattccaagggtctgggttactgcacagatatttaatagattttgactaaccattagctttagtaactacttaatgttctggatttagtaaccactttagtggtctggattttaatattttatcctgtattttgaagtgtttttagtgagagtgtttcaaagatcctagcccaccatatttctagagagggaattcctagcattccttttttatttacactatttccgtactacaaaattgacttttctcaaaccatttacttatgctttagtattgtatcacatcaggaaatcatcttgattttccaggatgctgtggtataactgaaagtgatttttttttttttttttggagacagggtctcactccatcactgaggatggagtgtagtgtcacaagcttggatcactgcaacctcctcctcccgagttcacgcaattctcttccctcagcctccttagtagttgggagtacaggtgtgcaccaccacgcccagctaatttttgtatttttagtagagatggggtttcaccatgttggccaggttggtctcaaactcctggcctcatgtgatcctcctgtcttagcctcccagaatgttgggattacaggcttgagccactgcacccagccagcaattttacatactatccttcagccaagggtacttggtgtagggcaggtgattagtttcttaaaccttcctaagacagctagtggtttactgactttataaggattaagtgatggtaaatcttagtggatcaccaagcatcttagaaagtctataataaagtattttataattaattcttaaaatggcttttgatttaagggagttttttgttttttttttgagatgcagtcttgctctgtcaccaggctggagtgcagtggcgtggtcttggctcactgcaacctctgccttctgggttcaagtgattctcctgcctcagcctcccaagtagctgggattacaggcacgtgccaccatgcccagctaatttttctatttttagtagagatggggtttctccatgttggccaggctgctcttgaactcctgaccttgtgatccacccacctcagcctcccaaagtgctgggattacaggcatgagccaccgcgcccggccctaggggagctttttgaatgataggtttattatgtagtatctcttaggcttttgggtgcggtctgtttgaaaagagatcctactgctaaaataaacggaaagaactgctgtagaacatgttagtttattatgagtctcttaataacttcagagttttactgatggtttataagaacttagtatttctactttgtttttatagtagtagtctaaaattctactggatttcttcctccttcccatcttaccaacaacatatagacgtcgaaaaaagttatttttttctcctagatgtgactgcaaaataattgtacttgcaaaaaataagaaggtttttacttataaaacaaactttacattttaacaaaactgtttaaaaaactttccggaatgttttatagtattgcctcacctttaattccatctaagcatattcattcccatgagtatatctgtaaattataagtatactattaccctttattccttatattatgaaaccaagggtcaaagagactataaaactagaacccagctctcctgacttactgaccagtaaactccctagacaaaactatgcttccttagtgcgaataagtacaattttaatacttatgtttagtaggagtcataagttcctaatatatattgcagtgtacttaatttacaagttcctaatgtatattacaatttacttaaaaatgaaaatgctagtgtctgttggagatgaggatagaagtacgaagatggcactataacatggtggtgtgaactctggagttagacagactttggtttgtatctcatttctgccacttaactgtgtgaccttaggcaagttacataacctcttcaagcctgagactccttttgtacaaaagggatgtactgatagtatcagcctcacagttagcattatgtgagcattacatgcatttgtaaagcacttagtcacagtgcttatataaatgaaagagtgattcttggatagcttccagccttgttggaatcacatagcagggcaaactttttctctaaaggagtagacaataaatattttaggatttgccagccacttccttatagttatttccatgttaacatgttccatgttaaggacttgacagttataccatttagacttgttaatttttttcttaatgatagtttcttaattttatggtgaatcatctaaaccagttttggaactaagtcctgttggagctatataattttaaactaattcaagtttccattatactaggaatacctagaactaacatgattgctcttgtccttcccaatggatgatggtaatactgataaggactcttggtaaccccgaagacggggtgaatccatatccctttattatacacgtaagctttagttttgtaagtatggtcaaaattatcagattccatgttacgttaatatccttgctaggaagtaaactgtataaggtaaattgttggttagaaaacatttacttttctctttcagttgaggctaagacgtctgaagccaggccctttaatgattctactcatgctgagcccttgaatgattctactcacatttctttgcaagaagaaaaccagtcttctgtcagtcattgtgtccctgatgtttctacaattactgaagaaggcttatttagccaaaagagtttccttgttttgggttttagtaatgaaaatgaatctaacatcgcaaacatcataaaagaaaatgctgggaaaatcatgtcccttctgagcagaactgttgcggattatgctgtggttcctctgctggggtgtgaagtggaagccactgtgggagaagttgttacaaatacatggctggtaagacaacactagtggttgaaataaagtatcgaaggatatctgaatgccaagaaggttaatgtttatttcttagacagttcagttacagtaaatcaatgcttggacttgaacactcttgattttgcttttagcaagggaaattcaaaattaaatgtgcaagcttcttggcctaatcccgatacagtagagattactgtttcccagggccacagcagcaacattccttcttaggaggtcactctagggtcatctcatactatttgtcttgttttctcataaccaaagcatcactggtaatttcactgttgatttttttttttttaacattccaagaattatgagaaaaatagtataaactaatacattagaaggaatgaaatttaaagcaacattcagtaactctaataatagatcttaccgattttaatagcctaatgtaattagtcgatgtatgtatatgtgtgtatgtatatatatactctaacattatgatatgaaatgtattgagaatgagcatacacaagtttgtattaaagtaaaatttcttcttatcaaaactaaattattgcttctgtacctgaaccagtgttaaccactggttgcttatttcaggttggctttactatttcttttgtttttaaaaggttacttgcatagactatcagactttgtttgatccaaagtcgaatcctctcttcacaccagttccagtaatgacaggaatgactcctttagaggattgtgttatttcatttagccagtgtgctggagcagaaaaagagtctttaacattcctagcaaacctccttggagcaaggtatgtaatatttttaatgcacctgttgtattggtgtatctttttatttattttgacttcttggagagcattcaaattagaatttggttgggtgtctttattatatttatgagtgttatgtggttccttctccactcccactgcttcacttgactagccttaaaaaaaaaaagtgcctctgttgtccaaagatgaaaacttaggtatcattagaggtaataactgcagtgggtccaaacacatgaaatagtgtttaagttgtgacttcataatgacaccaaataaagtaaggtaattggtcatctttgaaagatgctagagaaccagtccattactttgaaagctgacaaaaggaaaggatcaaggaattaccttgcatttcctgtgcagtttgcatcagggtaacatgatagtggatacgacaaagtttccctttataaagatgtttcaacaaacaaataaataaataaggaatgataagactgtaacccctaatgaatgaaagaatctaggcattgaacatcaatagtcgatcacacaataaagggacaagacatgatgtgccttcttacaaagaatacaccaccactttgaagtagtcttgccaaaataatcaaacctcaatctgatgatgcttctagatccaattcccaatttataggaaatgcaaacagcagaataacacgttaaactatactacagtgatataatcagcaagacccagactttagtacaactctggcataaatgatccagtgtcttcaatgaatatatattaagggcatggaaaagaaggtaggaacctataagctaaaagacttgaaaaagcaaaagcctaaatgtagtctttaaagttgccattatttgattatagaaaagtaaagaagtgattactataagtatccaaataggccaagcacagtggctcacacctgtaatcccagcactcgggaggctaaaagattgcttgagctcaggagttcaagaccagcctgtacaacatagtgagacctcgtctctatttaaaaaataataaaaaaaaatgagccaggcatggtggcatgtgcctatggtcccagctactcgggaggctaaggcaggaggattacttgagcccaggagaccagggctgcagtgagctatgatcacacaactatactccagccagggcaacaaaatgagatcctgtctccaaaaaaaagcccaaatagtggctactattaagaagggagggaagggggtttatatggcatgttggagaggttctggggtagttagcaagattctgtcttctgacctgggtggtggacttaagggtttcaccttataataattcgtatagctgtatatttctttttttgctgttttctgtttgaattatatgaaataataaaattcttttaaaactgaaattgtggaagataataacatacatgatgacagactccactggatacagctaaagctgtactcagcaggaaagtcatgcaaattctgaaatagaataattgggactagccctaacagttattaaaatatattttgtggccaggtctggtggttcatgcctgtaatcctagcactttgagaggccgtggcaggaggccaagttcaacaccagcctggacaatatactgagaccctgtctttacaaaaaattttaaaaatgagccaggcaatgtagcataaatctgtagtctcagttatttgggaggctgaggtgggaggattgtttgagcctgggaggtcaaggctgcagtgagtcacagtggcgccactgtactctagcctggaggacagagcaagaccctgtctcagaaaacaaacaaacaaatatatattttgtgaaacttcactaaataacagtgtggttacgtgtagcagaaagtttaattaatggacagcaaatgtagcaggagacccaaatgtaaaaaggaatttacgatacaagtgacatttcaaatatatataaggaagacatggcttattcaataaataggattcattaaagttggagcagtatctcatatctaaataagtactgaatggattggtgggttaaatgtaaaaaatgaaattataaaagtactaagataaacacaaaacatagaaaaaaaaagtgctaggaaacatgggaaatttaaaaatctgaaaagttgggaactagaacataaaacccagaagtcataaaagaaatcacggaattctgttcaatctcaagtcgtagacttctttttctgccccgtattctctgtgtttaatatcctatgatcttgaggcacttaatttctctgtattttttcccatgtctatacttaaatattgagaggatcaaatgagataatatgtagaaatgctttggaaagttgtagtaggttaaaaaataataataatgttatttatacactttgctcctgtcattttttctgtgccttcttttgggaggaaaggacaaggtgtgggggtgataactaattaaggaggtaattttggctgtgtgaggtggttcacgcctgtaatcccaactttaggaggctgaggcaggaggatcacttgagctcaggagttcgagaccaggctaggcaacattgtgaaaccccatctctacaaaaaatacaaaaattagccaggtgtggtggtgtacacctgtagtcttaggtactggggaggctgaggtgggaggatggcttgagcctgggaggcggaggttgcagtgagctgtgattgtgccactgcactccagtctggacaacatagcaagaccctgtctcaaaaggatttttgctgtctgttctttgcatgtctaattatgtttttataaaaagtttgttacagcaatacatttttaccctagagtaagcatttgtaaggggattagcttaatttcagatagagtaaaccaacttttaatcagtatttttttttatacttacatgatctctaaccacactgttgtgttggaaattttgttagttttgcgggttaattgtatatgtgaccatttccacttctttaaacataaatttcagtgttcaagaatactttgttcgcaaatccaatgcaaagaaaggcatgtttgccagtactcatcttatactgaaagaacgtggtggctctaaatatgaagctgcaaagaagtggaatttacctgccgttactatagcttggctgttggagactgctagaacgggaaagagagcagacgaaagccattttctgattgaaaattcaactaaagaaggttaatacttttattctgttcttttatatatatttacaactagatggtttctgggatataaatgtgccaatgcttgtgtttaggaagggtcattgatttttgcttttcacattgggtgcagtgagggtctcagtgttcgaagtctacagatgtaagcttggctcctatttactgttgattctttctatggctcatagtaacacactatataattaacatgctatctctcctcttatctttgggcttctgcatgtttcctgtagaccacctcacagttgcctgctcttcctgcttatctttcagttctcagctaagataccactttccctgggaagcctttcattttttctttttaattattattacactttaagttctggggtacatgtgcacaatatgcgggtttgttacatatgtatacatgtgtcatgttggtttgctgcacccattaattcgtcatttacattaggtatttctcctaatactatccctcccccatccccccatcctacgacaggccccggtgtgtgatgttccctgccctgtgtctgttcaattcccatctatgagtgagaacatgcggtgtttggttttctgtccttgtgatagtttcctcagaatgatggtttccagcttcatccatgtcccgacaaaggacatgaattcatccttttttctggctgcatagtattccatggtgtatatgtgccacattttcttaatccagtctatcattgatagacatttgggttggttccaagtctttgctattgtgaatagtgctgcaataaacatatgtgtacatgtgtctttatagtagcatgatttgtaatcctttgggtatatacccagtaatgggatcgctgggtcaaatggtatttctagttctagatctttgaggaatcgccacactgtcttgggaagcattcttgactcaccaaggatggcctttgtcttggtataatgttttttgtttcaccatgacactctgtatcatcccttttatctcttacctcagtgttataatggttgtttattttgtgtcttcctgctaaatttaaagttccagaaaggcagtgaacatgcatgtcttgtgaattctgtatttcccatgtctaacactaggcctggcatggagtagctatctaataaggttttttgttaaatgttgaaaaaaggtggaaggcataggtggaagaatacagtaccctctcttgtaagataatagcatccatgggcaaacttcagggacatatcagcagcttgggaatacctctcagagtcattacttattttgccagacagactggtaattttatgactgaggctaagtgatgttcaggtcatattaaaatttgattaaggactttccaaaactagactgtagttaactctgagtacctgtaattgagatttttctttttactctgtcattgactagaaagacattcactgataacaatttttggcaaataggcttattgagacatagcaagatgaaacaggaaatctattattattttttcagttaatgtgcttgtctaactcaacatatatttaatgcataatctggtttgtttcttggaaagtaggtatataattttgtgatttaaagtgtacctgagaattgacatgaaaactaacagattaggatgccgaggtagatggatctcttgagcccaggagttatgcaagaaagaaaggaaagaaaacagtataaaatattacttcttgtgtaccgggaaaaagtgggcattagtggctcatatttgtttcttttcattttaaatctctagaacgaagtttggaaacagaaataacaaatggaatcaatctaaattcagatactgcagagcatcctggcacacgcctgcaaactcacagaaaaaccgtcgttacacctttagatatgaaccgctttcagagtaaagctttccgtgctgtggtctcacaacatgccagacaggtcgcagcctccccagcagtaggacaaccacttcagaaggagccctcgttacacctggatacaccatcaaaattcctgtccaaggacaaactcttcaagccttcctttgatgtgaaggtaaggtttataggcagtggtcccagagttaacagttttaccgtttataaagttaaagcaccaaatttggcatcacctctgaagtgtagtaataaattttccagagacattggcaagtagatttatgttactgagtttgaacgttttgagtcccagcatacatttagggttaaggtaacagctatagataaatatggtgtgaaattaggacatctgggttcaagtactggatcgatcttgaactgtatgactaggccaatcatttaacatatctgagcttcagtttgttttttcatacaaagaagataatatttgctctgaaaattcatagattataaagatcaaatgatgaaatcactttataaactataaaatgtaaacacactgatactttatatattggttctcagagtacacccgggatttgccttctgaaaatgtgtgtatatcaccttacttgaattgtttcctgtaaagacatgagttaagtctgtgttttagtttgatctcgtgagcattgtagtatggctccctttctgaaaaatgcatttgtaaatcaggggctaatgtaatcttccaaataattttctttgattttccaaaactgattttcatcattatttctttagtagcttttgacctcttaagtggctgttcaaacccactgtctatgatttctttatccacgaacctttgaagaattattttactcattcacgtgttgatatttttgcttgtagggtatttagaagcaatattttaataatttttattgtgttttggagtggacttactaaaaagtttatagattattcatattcagaaaataaatattaattgatatccaggacagttttccccaagctaatttatgcctttatttttggtcagaattccagtgacgcacattaaaaaaagtgtgtctttactattaaactcaaaattctaagttttcacatgaaatctcttctgaggtaacattttgtactgtgattaatactcaggtccatatcccttaagacatagaggaaaatcagtcttgagaactgtgaggtgtaggatcaagcctcttctttgcctcctactgccttttaaaagcaagtcaacctctttcggcttcattattctcatctataaaatccagatgatctctaaagtgtcatagctcacagactctctgaagagcaaatgtaataatattggtgggcaagaaaatagtagagatattttcagtcattgagaccattcttatatagatacattgcaataaaagttttgcagtggaaagctgatagttctgaatagcctcaatacaaaaaacacattaaagattttattgtttagagtcatagtttattgagcagtgtttttcctcttttttctttcttttttgatggcacataaataatgcttcatcttataatcttataagcattataatgcttcatctataatcttataatcagatgataatcttatcatcttcaaactgatataatatggtatgttgaattctttacttaaaacatgaaagggcccatggaataatcacaaaattgaccatctattaggcctcacccttgcccccctcaaaaaaactcaccacttatttaaacttaatttttaattaatatacatcagagcagtacaataaatatactgctaatgaactatcagggttaatcattgagaagccactatacacgttcagatagagaccatggtcagtactgtaaacccttccttgtggctccatcgctgcttcctccctaaagtatactcctgacttctaataactatagttttgttatgcttgtttttgacttttaaatatgtggaatcatagtatgtattcttttgagtctgttttttttttattgttctttaacccttatttagatttgtctgttttgctgcatgcaaatatagttcatttatttattcctttgtatggatatacagaatttacatttccagtgtactgttgatgggcatttagttggttactagttttttgcccttacaaaataattttactgtgaacattcttgtgcgtgtctcttggagtctatgtgtgtgtgttactatgtggtatatacctggaagtgaaattgttgggttatatttcagcttcagtagagaatgacaaattttttgccaaagtgattataccagttcatgcttccaccagtagtgtgttgagtgtacccagtgttcctcatctttgctgatacttgctattataagttgttttatttcactttttacttcaaaataatttctaacttacaaaaagttgcaaaataaaagtggtacaaggggctgggcgtggtggctcacacctgtaatcccagcattttgggaggctgaggtgggagcctcacttgagaccaggagttctggaccagtctaggcaatatagcgagaccgccatctctaacaaattttttttttaattagctgggcttggtggagtgcacctatagtcctagaactcaggagggtgaggcagcaagatggcttgagcccaggagtttgaggctgcagtgagctatcatcctaccactgcactccagcctgagtgacagagcaagaccctgtctcaaaaagaaataagtacaaggatggctggacatagtggctcatgcctgttatcccagcacattgaggctgaggtggatcacttgaggcaaggagttggacaccagcctgggcaacatggtgagaccccacatctacaaaaagttggaaaaattagctgggcatgatgatgcatacctcttcttacttaaatagtattctttattatttgtcagttttaaattatatttttgactcccactaattgcctgtatagaagatcttattctctttcccccttttctctcttctatttttcattgcatatttttttactttgtcaggagggaaaatatattttttcaacccacagaccccaccctcgttttggtcttaactctacaatcgaatatatgaaatgtgtactcttctttttgaagcttacctgtcacttttggtaggatgaagttcattttctagtaggttcctcaggaatctgtgtgtacacacgtgtacagtattccttgagttctgcatgttcataacttttactgtggccttgcttcttctacaaattgtttggatgtactattcttagcttgcagttttttttcttgagtttcctgaaaatgctcttccactactgccttgctttgtatgtgttgtttttgaaaaaaaatctgatgccaatctaattaaattacttgtctttggaagttatttcatctttttgcctggaggtcatgtggatttttcttttatcttttatcttttttttttaagacagagtctcgctctgtcacccaggacccaggctagagtgcagtggcacaatctcagctcactgcaacctctgcctcctaggttcaagcgattctcctgcctcagcctcccgagtagctgggattacaggcatgcgccaccatgcccggctaatttttgtatttttagtagagatggggttttgccatgttggccaggctgaccttgaactcctgatatcaagtgatctgcctgccttggcctctgaaagtgctgggattacaggcatgagccacaacacctggccttttcttttatctttgaactcaaatagtttcacgaggatgtctagatgttaagaattctcaatcatttgaaatcagttttccacaatacatggtaggttttaaaatttgattcttttcaaatttttggtctgagagatgagaagaatggagttgccagtccaaactgagttgaacagaacaggttgggattggagcctaaagatctagagttcacatgttagacacattaagtttgagatgcctattagatatccaagtagttgttaaataggcagttgcaaataacgctggaagtttgaggaatggtttgggctggagataaaaatttggggttctgagtttgtaggtaatgtgtaaagccatgtgagaatagatgccaagagagtaggagaaggcaaagaaaggaaaaaggttttgttttgttttgttgtgtttaagacaaggtctcgctgtgtcgtccaggctggagtgtagtggcatgatcacagcccattatagccttgacctctggactcaagcaatacttccacctctgccttcaaagcaactaggacttcaggtgcatgtcaccacacctggctaatttttaatttttttgtagatacggggatcttaccacattgctcagactggccttaaattcctggacttgagcaatcctcctgccttggcctcccaaagtgttggggttataggtgtgagccaccacgtccagccaaagaaaagagctctaagcaacaccttgaggtgctcacctttagaggaggaaccagcaaaggagactgagaaggagctataagagaagaggaaagcctagagcttatttcaaagagccaagtatttcaaagagggaggaggggttaactatgtccaggactgctctaagataaagaaaggtgagaatagaaaattggccagtggattgagcattatgaaggtcaatggcgtcatcataacaataagggttttggtggcatgatggaggtggaagctggtgtgggttcataaagaaatgagaagaatcggagacattgagtgtaaacaacgatttttgaaggaatcttgccataaaggggagccaagaaatggagttgtagttatggggcaaagtagggtcaaaagaaggttgttttctttttaaggtggaagaaatagccaggctcagtggtgcatgcccataatcccagcactttgggagcccaagacgggaggatcacttgagtccaggatttcaagacaaatctgggcaacatggcaagaccctgtctctacaaaatacacaaaaattagctgggtgtggtggtgcacgtctgtagccccagctagttggtaggcggaggcaggaggattgcttgagtccaggagatagaggacgcagtgggcagtgatcatgccgctgtactccagcctgggtgacaaactgagaccctgtctcaaaaaaagaagaagaaataactatatgccagtgtaactgccattagagagccaattgatgatgcagatgagagaaggaagacttgcaggaggcttgagtctgagaggcattgggatctacttcttaagtagaggaaggtactagtggcacgtgtgctgaaggcagatagatgtggtatgggagcttctgatttttatataaggaatcctctaaaatgctttgaagaaattttaaaaagtttagcatatagaaagacttaccatgttcttgcaaaatagatttaaacattgtcaagatctataaaggtgtattaatctgtttgcacattgctataaagaactaccccagaccgagtaatttattcttatttttatttttttattttgagatggagtcttgctcttgtcacccaggctgaagtgcggtggcatgatctcggctcactgcaacctccgcctcctgggttcaagcaattctgctgcctcagcttcccaagtaactgggattacaggcgcctacccccacacccggctaatttttgtattttcagtagagacggggtttcactgtgttgggcaggctggtctcaaactcctgacctcaagtgatccacccacctcagcctcccaaaatgctgggattacaggcgcgagccaccacgtccaactttataaagaaaagaggtttaattgactcagttccacaggctgtacaggaagcaccactggggaggcctcaggaaaattacaatcacggtcgaaaatgaaggggaagtgagcacgtctttcatggctggagaaggaggaaaagatagcggggggagatgccacacacttttaaacaactggatatcagccaggcgcagtggctcacgcctgtaatcccagcactttgggaggccaaggtgggtggatcacctgaggtcaggagttcaagaccagcctggccaatatggcgaaaccccatctctactaaaaatataaaaatgagccgggtgtgatggcatatgcctgtaatcccagctactcgagagactgaggcaagagaatcacttgaaccaggaggcagagattgcattgcaccaaggtcgcgccacagcccgggcaacagagtgagactccatctcaaaccagatatcatgagaactcactcattatcacaagaacagcaagggggaaatccgcccccataatccagtcaactgccaccaggctcctcctccatcattggggattacagttcaacatgagatttgagtggggacacaaatccaaaccatatcaaaaggtaatgtaggtcctagaaaaaaatgcaagcagaaacaatattaaaaaaaatctgaaaagtataattgcaggtaggcagtagccctaccgtttattaaaacctcctataaagttgcagtagttaaaacagtgtggtgtcacgtgaataatcaagttagtgtataagattatactccacaaataggggaatttattatgtaataaaggtggcattcaaattggacaattaggtagccatctgaaaatacgtttgtaattaaagctcacactttacatcagaatactttttagatgatcaacttttggggtttttcttgaaataggatctcactttatcacttaggctggagttcagtggcatcatcgtggctcactgcagctttgacctcctgggctcaagcagtcctcccacctcagcctctggagtaactcagactagaggtacatgacactgtgcccagctaattgtattttttggagaggtagagtctcaccatgttgctcaggctggtctagaactcctgggctcaggcagttctgccttggcctcccaaagtgttggaattacaagcgtgaacaaccacacccagcctagatgatcagatttaaacataagaaatgaagccataaaaattcccaaacatgtcatgaatttgtttctaaaataatcctagtgtggggaaggcctaactataacatacactccaaaagaaatagaagattcgtatgaatttgacagcattaaaaattctctaactgggtgtgatggcacatacctatagtcccagctgacaagggaggattgcttgagccctggaggcagaggttgcagtgaactaagattgagccacttcagtccgttctgggcaagagagcaagaccccgtctcaaaaaacaaaaaaattacagcgagtcaccgtgactcacacctgtaatcccagcactttgggaggccaaggcgagaggattgcttgagcctaggagtttgagaccagcctgggaaagacggcaagaccctgtctctatgaaaaattttaaaattagctgagcacagggttgtgcatctggagtcccagctacctgggaggctgaggtgagaggatccttgaatccaggagttagaagttacagtgacctataatcatgccactgtactccagcttgggtgacaaagcaggactccatctctgaaaaaaaaaaaaagctccatggcaaaaatttgacaaatgataaattgaaaataaatacgtgggtattatatcacagttgatacatgcacatataaattcatacaaatgaatataaaagtatattcatacaagcgaatatattaaaaaaaagactaacaacccagtagaaaaatgggcaaaggataggagcagatagttatcacaaaaaattagatataaatatacatatagccaggcgcggtggctcacgcctgttatcccagcactttgggagtcaaaggcggttggatgatgaggtcaggagtttgagatcagcttgagcaacatggtgaaaccctgtctctactaaaaatacgaaaaattagccaggcatggtggtgcatgcctgtagtcccagctactcgggaggctgaggcaggagaatcgcttgaacccaggaggcagaggttgcagtgagccgagatcgcgccattgtactccagcctgggtgacagagcgagactccgtctcaaaaatatatatatatatacacacacacacacatataaagatatttaacctcattcagtataaaagagtagaaaattaaagcatacagataaaattttttagtcttatcagattgtcaaaaaagaaaaatctgattactgtgatatcaagcacgtttggaaaacacacacactcatactttgctcatgaaaatgtcaacattggtagatacatgttggtcttgtttttttagtttttttaaaaagaaattgggtctaactgtgtttcccagactcgtctcaaaactcctggtcttgagctgtcttcttgcttcaacttctctggagtagctgagattactgacaggagccactgcactgggctggtagatacattttgcttaaaaggtttcctttactcttgtgtgtgcaaaatggtttgtgtacaaggttattcattgcatcattatacttgcaaaagactgttaaccgaaagcttatcagttgtacacaggttaaatacattctgatacatacatggaatactatacacatgcaaaagagaatgagcaagccatttggacaacagtagcttcctttcaggagggaactgttggtggctttagaacaggaatatattttgaacttttgaagatttttttttttttaattctcagctcattttgactttctaaccttccttataatccatttcttgattatatccgtcgttgcttatttgtttccttctgggtttttttggtttgttttgttttcaaattcaactctaagattcaggtaagagacaagcactgctgaaaatgtaagctagttagtctctttgaaccaatttgctggacagtatggaatttttgttcacagtatatggatttgattatagtttattctttttcttgttatttggaggaaaactagaggaagttaaactgtaatccattaattttgaggattctcccccttctctctctttacccctctctcctcctctttctttttcctgtcctattaacccatcttgcttctctctctctctcttcttttctccatctctctctctccttcatatgtataggatgcacttgcagccttggaaactccaggacgtcccagccaacagaaaaggaaaccgagtacgccactctcagaagttattgtcaaaaacttgcaacttgctttggcaaatagctctcgaaatgctgtcgctctttctgccagccctcaactgaaagaggcccagtcagagaaggtaggattagttctcttattaaaaggaagttttagataacatttcaaacaataatgactgatctgtttcttttattttccatggacaggaagaagccccaaagccacttcacaaagtagtggtatgtgttagtaaaaaactcagtaagaagcagagtgaactaaatgggatcgcagcctctctaggagcagattacaggtagttggcacatctttctgtttcatggtgatatgactgaaatttataaggaaacctaaagctattgtgagcatctacaagaatacatttattttgtttcatgcatctttatctacaaaatctctccagttgatttttaatttaccacatctgttgaaaatagcctctcacatatcaattcactcttatatgtatataatgtatattttttagggtatgcacaacaaatattggagagcctattttatgccactaactattctagaaacctgggatccatgaaggatcagtatagtctaaaagaatccctgtgttcaaggagtttagagtctattaatagtaatacatctggatctgagattaagtttatttttactagtgatttttcagattagagccctctgggagtagtactaagtactctggcagccctcctttattaagatagtcttttttgagcatgttttcattatctttttttttttttaaactttggagacttagattgtcagatttttcttcagtcaacctgacagcctaagctgaaaacagatctctagcacaaatggcatcagtatccagaattgagaatctcttacctatttcagccagtcctgagttgactgtactcctccactagctgtaatgcttgctttgttgataacttgtgttcagccattcatagatatcataagaatttgtttaacaaatgatgaaccattgcaggaatatgattagtttcatcttcccctttggtaactcttatttcagtttgttttctatttgataaagaaattaggacaggaaaatataggagtaaaattgatctgtaatacatataagcatcttagtgtttggtacatccatttgaaatagtgaagctcttctacggtatatttgtattacctattataaattgttaggtaatcttatctgttattatctaattacctattatgttacctattgccagttgctgagcattatctcgtttcattctcatagtagccctacaaggggtgtgtgtatatttttttttcctcaaaattgaatgtttccttgtttattctgttttgatgtagacatgatataagactttcaagggaacatataggatgtatgtttttatatgattttaaatgccagtcctctcagtataaaaaatagaatttattactgaaattcctaaacagaatttaaccattgcattgcattaaagtttatattaaatcttttcctgaaatggattggtaattgataaagggaagagccttataatatgcagaggttagatatttatatatgcatagagtaaagcagttctcaagtgaagttgttccaaatgttcccttccatcatctaggaccagactgtcccaaagagatcatcggatactgtcttctgtcttcagacagttaaacatgtaggcccgatctttgcaacaaatcagatgcagcatcttcattttattacaaatatttgtgtaacattccctctattaaaatgaatataaatataacctacctacttttataatttaaaaaagtagcagacagtatagcactctgtgatgcataggagaaatagaaggtgcataatatagaaaagatatatgttcagttatgtataatgcctaaggctgactacactagaaaacaatggagtattaatacgtttgtatacctatgtaaaggcaccacaaatccaacagtcccaaggctgagaccgatctggggactcagataccatgagtagcagtggtcttccatcaatttatacagtagtcacatttttgtaatattagtgtatattaaaactgcaaaaaaataacttgtttatatgtcgaacaggttctagactcaactaattataaacaacttttttttacatacgtgaatttgtcgggacattagaatatcatgcaagatatgacataattatatgtatgactgttccccagaatttccagcatcctgtaccttacccactgcatgctagtagcaccctccaacatacaaacacacattgtaacaaccaaaatcaccctcacaaatgtccaaaataacccctgaagtaacacttttgctgaaaccgctgatctagaccaagggtgtatgggctggttcatctgtttttgtaagtaaagttttattggaatacagcaatgccttttcacttacaaattgcctatgactgctttcacatacaagacaaaagttgagcagttgcaaaagagattgtttggcctgcaaagtctaaaatatttactatctggccttttaagaaaaaatttgccaaaccctgatgtaaaccatctacaaccactgacagtctgttcttgaatggcctctgaagactgaaactcatggtttccatattgtcatagtggagttgactggtaaaccaaattgattcaggcaaaaatactcctctgtttttctgaattatcttgataatataccactacgcagaaagggagacagttattctgagaactaacaaattaggcaaggtgtatttttattgttatgttttaggatacatggtcagtaggaaatagagatttttataatataacttaggaggcaatagtacttcttacttctttttcttaattcttttttttttttgagagggagttttgctcttgttgcccaggctggagtgcagtgacataatctcgactcaccacaacctccacctcctgggtttaagcgattctcctgcctcagcctcctgagtagctggtattacaggcatgcgccaccacacccggctaattttgtatttttagaagagatgtggtttctccatgttggtcgactggtctgaaactcccgacctcaggtgatccacctgccttggcctcccaaagtactggaattacaggcatgagccactgccactgcacccagcttcttaattcatttgtctatttaaaaagctcagagatattccttacttagaaaatggaaaatattaagtgtccctaaggataaaattctgtttattttggtgattgtatttagaaatataatttttacctaccctttggtttttacttgatgtttcccaggtcaagagaatattgaatagcggccgggcacggtggctcatgcgtgtaatcccagcactttgggagcgcaaggcgggtggatcacttgaagtcaggagttcgagaccactgcccaatatggtgaaaacccatctctactagaaatacaaaaattagctgggtgtggtggcgtacgcctataatcccagctgctcaggaggctgagataggagaattgcttgaacccgggaggtggagattgcagtgaaccaagattgtgccactgcattccagcctgggtgacagagtgagactctgtctcaaaaaaagagagaatattgaataggaagaattgggagatcatagcataatataatagttaagagcatggcttttgaagtcaaagttatctctatcatttactcattgagtatccttgaacagggtactgaaccatgtcccttagttcttttatctttaagattaatgtaataataccagtgttaggattgttgtgaggaatggatgagataatgatgtgtaaaatatatatagtctgttttggggcatacaatgaatagtgactgccagcaactggagggcaagttggatgctttgcaatttattaatttgaaatacctttatggttactgtaaaagtgatattctttataaaagaaaattgaaacaattcagaaaagcataaagaagaaagtaatattttaaaggatattcttctaaacctctctctgtatttatatacctacagatatatgcataaaatttgtccaaaaagatagagcctatcatcatttttttaactgtttttttcttgaggcggggtcttgctgtgttgcctgggctgaagtgcagtgtctgttcacaggggtgatcatagcacactacagcctcaaactcctggcctcaagtgtcctcctgcctcagcctcctgggtagctgggactataggcatgtatcacttggcttgagcctgtcattttaatggtcttgtttactctagtccgaaagttttgggaaggtcagaatattctgttcacagtaaataagaatcatcttaaactaatgaggatgtttctcttggttatttgtttttttgtattggttatttcaggtggagttttgatgaaacagtgactcatttcatctatcaagggcggccaaatgacactaatcgggagtataaatctgtaaaagaaagaggagtacacattgtttccgagcactggcttttagatgtaagcagtgcttttttcccccccatctctgttaattgaaaatgtatacaaacattatttcagagcactaactcaagagttttcactctcaatggaactagaagccagtttaatagtcttggttaactgtacacatttcagatctttggcatcaaaaacttaacatctttagtccttaaatacttaacaaatctttaatggatactctttctaattctccatttccttgtactaattaaaaatgtgatatgaatggaaagtttataattatttggggaaaatttaacatatcaatagagtttagatctgtgtttcttttttttcctgggtattctctggagggtaattgatacctttgcaaaagcacaggaatggtttcagattttatacttcagtggatatgacatttaaaacatgaggacaatctgtcatttgtatgatgcaaatttttcagtgtaaactacttttcaaaccagttttgtgaactttttgccatattacagtataatgtattgcttgtccttatcctacttaacatcatctattcattaagattttgtcagtcctgtcttaaagcacaccattgtattgcagtgtgcccaagagtgtaaacatcttcctgaatctctttatccacatacttataatcccaaaatgagcttggatatcagcgcagtgcaagatggccggctctgtaatagtcgactactctcagctgtgtcttcaacaaaggatgatgaggtaggagatatggatgatacatttaccccctcttaagctaaaggtataatcatatattgctatgaaaccttatacagtggcttggtttgagaatttataatttttctttttcaatagccagatcctttgattttagaagaaaatgatgtagacaatatggccaccaataataaagagtcagcaccatcaaatggaagtggaaagaatgactctaaaggaggtaaaatattttattttttaattaaaaaaattttttttgagacaaggtctcaattttttgtggagatggggtcttgtcatcttgcccacactggtctgaaactcctgggctgaaaggatcctcctgccttgtgagccactgcacccagctgtaaaatatgtttaaattactaaatacaagcaaagcatatattagaggattgatttgtggtcccatgctgatcattaagtgataatttgcaaagttttatgtagtttaagtgtaaagcttatgaaatttatgaaactaggtttttatggagttagtgtgatacagccctattccattaaaggtaggtgaagttggtgattttttaaaaatctagtctttggtccagttcttttgagtgattttcaaaaagttttcttatatgtacaatatattttaacatatccacatggttttaaagatacaaaaagacatatgaagagtttcttccacccttattctccagccccccagtgttattagttccttatgtatccttctagagctgctttatgcatatatagccgtaaatatgtttttcccccattaaaaaaaaacaaacaaacacataggctgggcatggtggctcgtgtctgtaatcccagcactttgggaggctgaggcaggcagatcacccaaggtcaggagtttgagatcagcctggccaacatagagaaactccgtctctactaaaaatacaaaaaattagccgggcatggtggttgcatgcctgtaattccagctactcgggaggctgaggcaggagaatcgcttgaactcgggaggcggaggttgcggtgagccgagatcatgccattgcactccagcctgggcaagaagagcaaaactcttgtctcaaaaaaaaaaaaaaaaaaaaacataaatggtggactactatacatgctatttcatacgctgatctttttgttaccttgggtagtgttttatatcagtagataactaggagcttctttagtctttttctttcttgcttttcttccttccttccctccctttccttcctgtcccccttcctctcctttccctcttcccttcctttccctttccttctttcttcccttttctttctttttgggcaactgtattgtattcattatgaatggtcccactttgtttaggcatccattcttaataggcatttaggttatttctactttcttgcttttataaatagtactgcagtgaataaccttatacatggatgtcttttaatagatttaatatgttctgttttccttactcattctaacctaccaaagctttccctatgacttacctatttggttagtctcactctgttcattccaaatgcatttatttaatacttactccagagtttaggctttaaagaaaaccaaaggtaaatacagttgtcttgtcccttggtatccatgtggcagtggttccgaggacttacctcaggtaccaaaatccacagatgcttaagttccttatgtataaaatgacataggatttgaatttaaccaatgcacatcctcctgtatactttaaatcatctctggattacttataatacctaatgcactgtaaatgttttgtaaatagttatattttattttttttactggtacttttaattgtgatatttttcatttttatgtctttaaaatatttctgatccatacttggttgaatccatgcatgcagaaccggtggatgtggagggctggatgtatgttgtggtctgtgttttcaagagcctttggggagtctgggcacggtggctcacacctgtaatctcagagctttgggaggcaaaggcaagaggattgcttgatgctaggggttccagatcagcctgggcaacatagtgagaccttgtctctacaaaaaatttaaaaaattagctgggcgtggtaatgtacacctgtagtgccagctactcaggttgctgaggctggaggatcacttgagcccaggagttagaggttataatgagctatgaccataccactgcagtccagcctgggccacagagcaagactctgtctctaaaaaattaaaagaatctttgggaaaaatcagacacatacacaaatgactataagacatctcagagtgtagtacataccatgagagtcagaagcaggcagggagctttacagagggataatcactacaggtcttgatgaaatgtctttgaagggggccaggcacggtggctcatgcctgtaatcctagcactttgggaggctgaggtgggcagatcacctgaggtcaggagttcaagaccagcctagccaacgtggcgaaaccgcgtctctactaaaaaatacaaaaattagcccggcatggtgatgggcacctgtaatcccagctacttgagaggctgaggcagggagaattgcttgaacctgggaggtggaggttgcagtgagccgaggtcgcaccactgtccagcctgggcgacagtgctagactatcaccaaaaaaaaaaaaaaaaaagtatttgaagggcttcctagttatttcatatacagtgcttgtggtaagggctgctttttatgttctgcagtattcatagttttagtacattactatagcctgtagttaatattcagtaaatgtcaagtcaataagtttgtgttcaaccaggtctaaacaaaatagttaatgtaagatatggtaaaaaagaggaacttaccttgaatggtgtatttgtgtttgtttcaagttctgacacagaccttagagatgagagagaactttcagaagcagttacaggagataatgtctgcaacatcaatagtgaaaccccaagggcagaggacttccctttcaagaagtggttgtaacagcgcatcttcaacccctgacagcactcgctctgctcgcagtggacgaagtagagtcctagaggcactgaggtgtgtacctgtcactgatggcagaaagactagatgacttgagagaaaggatttacgtacctgctgctgactcaattccatgagcttggcctaatttagcttttttttctttttttccccaatatgcagtaaaagctgaaatttaaatatcaagactagtgaaggggttatatgcctaggccttatttagcccaaacagtaaatattatattccagtattatctattgcttttggctctctgctgactagatttttcgttctagcttgtccttccatttcttgctcccagcagttctagatttcttactcggaggtggagcagacatggagatttgtcttacagcagcacctgcttcacagtgaggcatgattgatactttttattacctccgttgagaaagaaatgattttaagatctaatttgcctcatttgaaatggattcagtaggcagttctctctgctctttagtattagtattcaatagtatttgtattaaacaataagtacatatatattttttcagagtctttttctaatgcaatatgtaaaatcttaaagttatttttgttgggattttgcatgcattttgtattctccttgtaaaatttatcttctagaaaaggtgattacagtttctagtgtgatgtgacttaagctcagttgcataacttcatctttttcgtgatagaagaaaaaaatctataattgtgtgataagaattatgggacttgtattttcagttgactaattgaattaagtataagataaactagcatttatcttacgctaactgtattacatgaggcagttcattatctcagtactgagtaaagtagctttttaatatgcttcagatcatgttttatcattatagagaacctaaatcctgtaccaaatcagagtaaataaatatagtgtgagaataaaaggctatattctttatttttgaagcaaaggaactatttgggggttcctttggtaaattgttttatgggttttggtgttttgttttgttttttgttttttgttttttttttttttgcttctccacagtgtaagttttatggtaaattatttttactaagaatgaatgaatgagtgaatataaagaaaattataggacttctatttactgtcacgtggaatcattacaatcgcaccataaaatgcacttccctgtaattcagcatattgctgttccaccgtagactctggaaagtggttaccaatagccaaaaggcccttctgataaggcagcctttacagcaagcctcccatgtaatcatagtgcttataatttcaagtaattaaaaaatataactactgttaagtaaagtaaccatagtgtttgaaacattaccctgtttccctaacctgtataattaaggaaaatcacatttttaaatgtaccaattactttagtatttttaaaaaatttcttgacactgttgaatttctcctttgaagttttagttctgtagacatgtagtcaaaatatgtgttcctagctaaaacagataacttttctggaagaaaccttaaacctttttaaaaaaaaaaaatgtccctaggttcatttatttaatatttttaatgcatactgtgtgctagatggtgggcatataaaggtgagccacaacttttatggtctaacttatggatttaatgagtttggatttgttattgctgtttatttaaactgtcacttctattccttaggcagtctcgtcagacagtacctgatgtcaacacagagccttcccaaaatgaacagatcatttgggatgaccctacagcaagggaggagagagcaaggcttgccagcaatttgcagtggcctagttgtcccacacaatactctgagcttcaggttgacattcaaaacttggaggattctccttttcaaaagcctttacatgattcagaaattgctaaacagggtaacaagaaagaaatctttgcatttgtttgtattaagtacatgttgacctcttaaaaataaacagatgagcatgttgtagttctctgatctgaatgtgcaaacaaaaaaaacttcgtagatatttctggttttggtttaaacttgagccagaaaaataatttgtaaattgaggtacttcatcagtaaattgaaaaacattttcataaatttggaaatttagaattgggcgtttttttctagacatggtgtctaccattgttcttttattctagctaaccctttttgtgtttgtggagttaatgcttggtttttcttcctatcatcttattttcatttaagtcttttgaattctgcctagcacatacctacatttgttctttggattgtatgagtttctttctgaattctcctattttttttcttccttgagctttaccttaaaaacaaaattttcctatctctcatcttttttcttccttttcttctttttcacattgcatgatgacctcccattagatatatagatttatctctgcttctgcttttctccaagtgtagaattgctctcatgttacaaatttgggttacacttaacaatgaaaacttggtatttaaggaaaatgttgggagaagcccacagataacacacttgctctgtttaatgctaataaattgcattttttctttattgttattattgtcacatgcagatgggatgcatttatttataagttctggggataggatacttttttgcctgtactttttacattccagagtttgtgcttgacttcatcttgactaagacagatgagaatatttcctagaatttgtttttagtcttatttggatcctgtcacactgcagcattttattgtcctcagctgtctgtgatcctggaaacatacgtgtgactgaagctcccaaacacccaatctctgaagaactggaaactcccataaaagacagccacctgatccctacgcctcaagcccccagtattgcctttccactcgccaacccccctgtggctccgcaccctagagaaaaggtttgttgatccttaatatggtgatacagcttttgcatactgctgttaggctgtattagaaatttgttgatgtcaatatcaaggcttcatcaaatgttgaaaactattttttgcattgtatcattatttgtatatttcataacttagaagactgagtaaaataccactataaaagaactgtgtatctgatcatttttaatgttaattttttctaaagtaaaactttcattccagattataacgatagaggagactcatgaagaattaaaaaaacagtacatatttcagttatcatctctgaatcctcaagaacgtattgactattgtcatctgattgagaaactaggtaccagtattttacttaaatccaaaatgtcccatataataaccatatttggaagtcaaatgtagtcaatattaatatcatttgtaaagtctagaagtagaggaaaagaacatgggtaacttgtctaaggctatacattgagtcagcattggaactttgattttaaaaagctctaaagtcagtagatcatgggatttaaaattcaaatggaatctagcagttgaggtttaagaatcttctgtgctgtttgactattcattcactaatgaagctttaaagacttactatataaataaaaccacattttaatgaacttgaaaggttaataatatctagagaggagctccctcttgtttttttgtttgtttgtttccagttagaaacagtgtggaggccaggcacggtggctcgtgcctgtaatctcagcactttgggaggctgaggtgggcggatcacctggggtcaggagtttaagactaggctggccaacatggtgaaaccctgtctctactaaaaatacaaaaaaatttgcgagacgtagaggcacatgcctgtgatcctagttactcaggaggctgaggcaagagaatcgcttgaacctgggaggcggaggttgcaatgagccaagatagcgccactgtactccaggctgggtgacaaagcaagactctgtctcaaaaaaaaaaaaaaagggaaaagaaagaattcagtgtggaagagagctccttcttatgtaacattattcttattccactggttgtcaggctctccacctgacatcattctagaagcagcatagtaaaagagcaatctggtatactagagcagcactgtccaatagaaacagaatgtgaaccacataggtcattttaaattctctagtagctgcattttaaaaactaaaaagaggctgggtgcattggctcacacctgtaatcccagactttggggggctgaggtaggaggattgcttgagcctaggaattcaagaccagcctggcaacatagtgagaccccatctcaaaaataaaaagtaaaatgaaacaagtgaaatgaactttaaacatatatttatcattcaatatgtgatcagataaaatatcagtgagtttttttttatataaagtaaaaatctagtgtttatttaacttacagcacatctcaatttggactaactgtgcttcaggtgtttgatagccacagatgtctagtggctactctgttgaacaaagctctatagagttaggaaaactatagtaagagaagttaatctggcagctcagcatggaaagagaaaacattaagaaatattggtggggtttttttgtttttgttttgagacagagtcttgctctgtctcccaggcttgagtgccatggcacaatctcagctcactgcaacctctgcctcctgggctcaagcaattcttctgcctcagcttcccaagtaactgggattacaggtgtgcgccaccacgcctggctaattttgtatttttgtatttttagtaaagacagggtttcaccatgttggccaggctggtctcgaactgctgacctcagatgatccacctaccttggcctcccaaagtgctgggattacaggcatgagccaccgcacctggccaaaataatggttcttaatagtggccctgaagtatcaggaaaagattaaatgttatttaatgctgtctttttaagaatgtggaaaactatgatatgctttaaaaaaaaaaaaaagatttatgtcaaatacagttgtatacttggaaaaactttctcttttttttgcgggtgaagctcacagctttatttttttttatttttttattattattattatactctaagttctaaggtacatgtgcacaacctacaggtttgttacatttgtatccatgtgccatgttggtgtgctgctcccattaacttgtcattttcattaggtatatctcctaatgctatccctcccccctccccccaccccaggacaggccccggtgtggaaaaactgtttcttcttagaaactttactcatacaaaacactttgtttcccagttccctgataacttaggtgaggttataagtcagaattgctaagctttacccagaactcatgaaaatgaaaggcttcaagtgtcagtctcctatagatttttccatctctgcaaactttggggaagagtgacagcaattagcagagaattgatctagaagagggcaggaagcagaggcagatgagtacagattatgttggaattcagagtcttgtaactctagaggttttccaatattagaatgcaaagagacattataatagatattatgcccaatccttcattttataaatgaagcaactgtggccaactgatatatatgtatataaatcagtctattatgttgtctgggtcgcagaataagtttgttatgtagaattggaaattgatgtttatatattaatatggaattttaccttcttgtctttttgtcactctgtgatcctgagtaaggtgctctaccagttttcatgtgcataaatgcagataataatagtaaccttccttcatatggttgtgagaattaaatgagttagtaatctggagcactttaagtagttcctggcataaaataaatgctcagaaggtgttgctgctattattattagagtcatcttaaatcatgagtttgaatgttttgttaaaatcttagaaagtccttgatatgaccgggtgtggtggctcacacctgtaatcccagaactttgagaggctgaggtgggcagatcatgaggtcaggagttcaagaccagcctggcaaacatggtgaaaccccgtctctactaaaaatacaaaaattagccaggtgtggtggcgggcacctgtaatcccagctactcagaaggctgaggcagagaattgcttgaacccgggaagcagaggttgcagtgagtcgagatcgcgccactgcactcctgcactccagcctgggtgacagagtgagactccgtctcaaaaaaaaaaaaaaaaaaagtccttgatataactaactctgcccaaccagtggtcaagttaacctctaagctataaatcaacagccatgctttacataagcttatgtttacttatgccttcttctttcctcaaagtcaggcttcatgcatttatatctgagaagaggttcaattattgctttttcccacctgctgcttcatctcttatttatctgtgtgtgttttcttcccaagcttctctgttggtctgccgacattatttccactcataaaaaatttcctcctgttttaaagtctgcagatgcccctatcttacttccatctccctggttacccatattcggtgcttgaaaactgcttttgtaattgagacttaagagacataaccaactacagcgtgtggctcatgtttatgttctatttctttttgtatcctaattataacaatccaagtgaagacaaacaggaaaaattgaacaaggatttagtactgagacagcaaagaatctttgttaatcctattagatctgataatggcattatggctgtttaagaaaatttccatatattctagagatgcatactgaaatacttaggggtcagtaacatggtatctagaatttgctttaaaatagttaagcaggaccaggcatggtggctcacgcctgtaatcccagcacttcgggaggctgaggcaggtggatcatttgaggtcaggagttcaagaccagcctggccaacatggtgaaaccctgtgtttactaaaaatacaaaaattagccaggccatagtggtgtgtgcctgtaatcccagctacttgcgaggctgagggaggagaatcgcttgagctggaggttgtggtgagccaagatcatgccactgcactccagtctgggtgacagagtgagaacctgtctcaaaaaaattaaaattaaaacagaataaaattaagtagttaagcaaaaaaaggtggcagaatttggataattttagaatataggtagctagtatatgtgtgggggttcattttactattttatttacttttgtatttaaaatgttcataataaacattttaatacatatatatatgtatataaagtaaaataattctaagtaagtcaagtttttttggtttaaatggtttggggcattttatttataaataatttctatgcgtagttgagattacatttttcctagaaagaagttgggaatcaataaagtacaatccatttttctctgcttaaggtggattggtgatagaaaagcagtgctttgatcccacctgtacacacattgttgtgggacatccacttcgaaacgagaagtatttagcctcagtggcagctgggaagtgggtgcttcatcgctcctaccttgaagcctgcaggactgctggacacttcgtgcaggtgtgtattcagatttgtggaagtttatttttctttaaaagcaagtgtccaccgggtgcagtggctcacacctgttatcctagcactttgggaggccgaggtgggtggatcacctgagatcaggagttcgagacatgcctggccaacatggtgaaaccctctctactaaaactacaaagattagccaggcatggtggtgagtgcctgtaatcccagttactcaggaggctgaggcaggagaatcacttgaacccagaaggcagaggttgcagtgagccgagatcatgccattgtactccagcctgggccacaagagtgagaccctatctaaaaaaaaaaaaaaagtaagtgttggctggcagtggctggctcatgccactttcagcactttgggaggccaaggcaggaggatggcttgaacctaggagttcaagaccagcctgggaaacatagcaagactccatctctagaaaaaataaaaacagttagctgggcatggtggttcccatctgtagtcccagctacctaggaggctgaagtgggaggattgcttgagcccaggaggtcaaatcaagaccctgtctctaaaggaagaaacagacaaatttatttatttacttaaaaaagtaaatctcagatttcatcacatttgctgactgctcataaaattgaaataaccaaatatggccagttagagtataccagctttttcaataacaaagccaaacaacgaaacttcgcagagccaggttcacctttaatcactttttaaatgatttaatttgaatgttagtgttgtttttaattgaaataacattttcttagaaagtttcaagattatctcattgtaagctttcatctttactacatagacagataatcaagttatcagtacatacctcctctgagactgtgtcctttcatgaagttagtcttacagcaggtgaaatttgtccatctgaatattaccagttgccaagatatagctatcattttgtttcttaaaaatgtatgtggtatttttctgatttctaattaaaagccaaatatacttgactcttatatgaaactaatctacatttcctccatgctcataaaacaatatttacttagtactgtctgtatttgtaacaattaaatgtatagctttaacagttattagactttgggctccttgaggagccctgtatgttgcacagtggctccccagactgtaacaactcaggtttgttggacaaattctctaggaagaagactatgaatggggaagtagttccatacttgatgttctgactggaatcaatgtacagcaacgaagactagcacttgcagcaatgagatggagaaaaaaaatccagcaaagacaagaatctggcattgttgaggtattaaaacacaattatataggtaatacaaatagcattcaatattgtgactctttcacattttttttaaaagagaatgtgcttcaggaaataatgattctacttgtcttttttccccaaatttttgatggctcttttaaaaataatttatatatgtaaaatgtggcccatattgcatttcttccaaagaatcttttcagcatctaatgtcaggggttcttgacctgagtccacagaccttctcaaaggaatttgtagatcaaatctgggaaggccatgtactttgcatggggagaaaaatacatccttatttttactaacctctaattgaaaattagcacttccggtcttttttttttttttttttaaattttaatcagcctacatcatgctttgagaaaactagcacttcctttaatgaaaggtctaggcaacaaatcacaacactatcaactgtacctgtaattttgcactaacagaaatcacatgtttctgttttgcattgtaattgcaagcatcttgaaatactgtttgtgttcatcagtactttagttatttatattatttgttaactgttgatttatcaagagaaactattaggccacatgttcatgtttcatagttcaggaacacaagtcaaagacaaacttctgtgtattaatgattcagtccaaagaaattctttatattccaaaatcactttgcactctgaaacataatagcactcttcatctcagattctttcatggaatcataacttctgtagaaatcagcatgtcctttctgttttggttcagccacagcaaacagagagctgcaaccccagggatataaggaatgctcccacaatatgaaatcacagacacttggccagaagaccacatatctgaggttttgtcaaagcactgaaagccatattagttattgtctgctactttaatataaagcacatctataattacacaacaaatttgtttttaatattttgataactttcaataaaatggcttccttttgtaatcctttatattttaattttaacattttctaaaaatcacccataaggtttgggaattatatctcaatacagctattatttagagtagtctaatgaccagactgccaaagggatccatggcttacaaaaaggttaattgtattagttcgttctcacgctgctatgaagcaacacctgagactgggtcatttataaaggaaagaggtttaattgactcacagttccacatggctacagaggcctcaggaagcttacagtcatgtaagaagcaaacacgtccttcttcacatggtggcaggagagagaagtgcagagcaaagtggggaaaaaccccttataaaaccatcagatctcctgagaactcactatcaggagaacagcatgagggaactgcccccaccatctgatcacctcccacgaggtccctcccccaacacttggagattatcattcggattacaattcaagatgagattttgggtggggacacagccaaaccattatcagaacccctgagttaaatagtctttcatgttgtattctaagttctctgatatctccaaatccttattagccatgataccctctcttttagagtaattccactggcttttgttagttgttattcccttcctaaatattttgtttccagtttgtaaacatttttaagagaagtgaaacgcaggcttcatctaacctaaggagctctgcttgaagctcttcccttgattaatcaaaagaaaaaaatactagaaaagactaaacatcaatcacactgctttgttttaatgttacctaatcattaatggtttttcattcctcacgtatttcttgatggcctactatgtgccagataccatggattcacgtttcagtgttctggccagagataattatactgtggcaaaagtaaagtttataagatttattgacaaaactaagtctacagataaaatcatgcattatctgtattattttgttattttccaaatgatttcaccactgattgttttttatttgtagggagcatttagtgggtggaaggttattttacatgtggatcagtctcgagaagcaggcttcaaacgccttcttcagtcaggaggagcaaaggtttgtatcaaattaatttactgacctttttacatgaataatcatctaaccaagattgctatgatgagttcttcattttctctactttttgaaatggtaatccttaagtacacattatacagctgaactactttggaatactggtagattgtgatactaccttgttttttcattaggtgctacctggtcattctgtacctttatttaaagaggccacacatcttttttctgacttgaataaactgaaaccagatgactcaggagttaatatagcagaagctgctgcccagaacgtgtactgcttgagaacagaatacattgctgattatctcatgcaggtttgtgagattctatccttgacctcctcattaccagagatacgtttatgtgcatagataagtaactgcacaacaaaaccttcagctcatgattagtagaagattagtctcctgttattctcttctattccagccctttcagttttattctatttgtgttttttattataatgaacatattatgtaaacatttagcttggaagttaaatatgagaagagtataaaaatctaggtacctctaaaggctttaaaaataccctttaaaatgttggaatataaagcagaaatcgattccaggagtccaaggagaaacatttatccaaaggtcctttagttttcttgactgtttgctttcatgtacattaaatacctatgttagacactgtggtaaatttaagcatttgctatatggtgggcttactactctcatattcagaattggcctgtgttgtgtaatttgaatggggtaagaaaaatcttctgacaccagagtgcccaaaaggccatcaggagtcagcaggcatgacacataatcataaggattagatttcataatcataatctatgaaggatttcaactgggatgatacagaaataaggggaggccaacactcaaagtcagctttgtgattttgctgctgtgcttggagattgctcaggatttaatagaatgcctaaaacacaaatgtgaagccgttatagagcagagggcatactgattagtatccacgattttatctaaggttttcactcaacgtgatgtttttgacattcattcaagttgtagtgtataccagtagttcattcctttttattgctgagtagtatttctttgtctgaatataccatagttgattcattttcctattgatggacccttggactcctggaatcagaaatgttccaataagcacttcccttgagcatcacataagtgctcgaaagtttaggattttgtaccatttctaacttttggatttgagatgctcaatctgtacattattggtgggaagtgtaaaatggtaaaaatccctttgacaaaaggcctggcagcttcttaaaaaacgaaatatttacttattctattacacagcaattctgtcctatttacccaggaaaaatgaaaaaatatgtccataaaaaagcctgtatatttttagtagctgtttgtcatcttggttatcattagtaaagctactaaaaatatacagggatttttaccattttacactttccaccaataatatacagattgagcatcccaaatccaaaagttagaaatggtacaaaatcgtaaacatttctgatttctgggtttcggttgctcaaccagtaaatataaatattccaaaatctgaaatacttctgattctaagcacttcagataagggatactcaatctgtgtaagccttctggttattccatattttgccaacatttagtgttggcagtcatttgatttttagccatgcggtaggtttatagtgggagcacattgtaatttgtacagagtgtttgtaatttgtatttccctgatgactaatgacatcgagcactttttctttcatggtctctttgtttgtttgtttgtttgttggtgtgtgtgtgtgtatttaatatttttttctaaaaagttattgttttagcttttatgtttagctctatgacctattacaaattaatttttcttaatgctctgaggtatggactagggctggtttttttccatatagatatctaggtgttctagcaccatttgttgaacagattttcctttcccacaaaagctttggcatcttgataaaaaatcaaatgatcgtatttttgtgagtctctattctgtttcattatctacttgttgatacctttcctactgtgtcttgattactgtagctgtacagcaacttttgaagctagtattaagactacaattttagttgtctttttcaaggttatttagctgttccatgtcctttgcatttccatatggactttagactcagcttgttagtttctacaaaaaaaaaaaaaaaaaaaaggcctagagtggttaagattaggattgcactgactctatagaccaacttgaggacagtaaacatctttacagtgttgagcattctattccataaacctagaatgtctctatttaggtcttctttaatttctctcagcaacattttgtggtttttcagtaagggaacttacctatcttttgttaaatttattcctattttgtgatgctattgtaaataaaaatttctagatttacatttagatttttttctacaatttgctgccaatccaaaagaatataaattttgtatattattatttatttattttgaggcaaggtctcactctgttgcccaggctggagtgcagtggcgtgatcttggcttactgcaacctctgcctcccaggcccaggagatccacctcagcctcccaagtagctaggactacagccatgtgccaccatgcccagctaattttttttttggcaaggggaaggggtagagatagggtttcaccaggttgcccaggctggtctcaagcaatccacctgcctcggcctcccaaagtactgggattacaggtgtgagccactgtgccttgcctgtcagtcttttataccctatgatcttaataaaattcacttagtacaattagtaccttaggctttcctacataagcaatcattttatctgcaaagagatttgtagattttcccttctttatgccttttatttcttgttgtcttatgtggctaggacctcaagtatgctgctgaatagaagtggtgagattgggcctccttgtctttattccctagcctaggtggaaagtgttcaatatttcaccagctatagggtcttcatagatttttttttccagattgaggaagagtccttttattcctagtttactaagatttctttttcatcattaattggggttaacttttataaaatgtctttttctacttctgttggagttgttataaggtttttctctttccttctattactatggggaattacattttcaaatgttaagtttcatgtatcagtcccacttgatcacgccatattaatctttgtatatattgctagatttagttgagtaaaaatttttaaaattgttttcagggtgggatattggtatgtaattctcattgttttgtaatgtttttgtcatcttttggtattagcgttttgctggcatcacaaacaagttgggaagttctcccttgattttctcgaagagtttgtgtaagatgcctctttcttccttgaatgtttgaaggtctggagttttcttttttttttttttgagacacggtctggctctgttgcccacactggagtgcaatggcttgatctcagctcactgcaatctccacttcctgtgctcaaatgatccttccacctcagcctcctgggtagctgggactacaagcgcacgccaccagtcttagctaatttttgtatttttggtagagacggggtttcaccatgctgggcttaagtgatccccacggcttcccaaagtcctaggattataggcatgagccacctggactggagttttctttttttgtatttttattttttagatggagtcttgctctgtcgcccagcctggagtgcagtggggcaatatcagctcactgcaacctccacctcctaggttcaagtgattctcctgcctcagtctcccaagtagctgggattacaggcatgagccaacacacctggctaatttttgtatttttagtagaaacggggttttaaccatgttgtccaggctgacctgaggctgacctcaggtgatccgcccaccttggcctcccaaagtgctgagattacaggcgtgagccactgcacccggcctggagttttctttatatgtggttttttgtaacgaattttctttactagatacagcgcttttcctattttctgtttcattttatgtcagtttttaataactggtgtttttcaaataatatatccatttcatcttatcaaatttgttggcataaagttcttcataatattcttattatccttttagtgtaataagtttattcctggctgggcacggtagcacacgcctgtaatctcaacagtttaggaggctgaggtgggcagatcacttgaggtcaggggttcgagaccagcctggccaacatagcgaaaccctgtctctactaaaaatacaaaaaaattagcggggtgtggtggcgtgtgcctgtagtcccagccactcgggaggctgaggcaggagaatcgcttgaacctgggaggcagaggttgcagtgagacgagatcacgccactgcactccagcttgggcaacagagcaagactccgtttcaaaataaataaataaataaataaataaataagtttattcctgatattgtcaacttgtgttcatttataactggcttatttaggagtctgttgtttagttcctaaatataagaggatttttttttctatctttttaatttgtgattgcccattgaattccattgtaatcacagaaaatactctataattttaattcttttaaagttattgagacttgttttatcacccagcttcatctatcttaatgaacatatcatatatgtgaaagattttatattctgcagctgttgggtgttgtgttctaaaaatatcaaataggttaatatggttgataatgttgatcagattttctgtgtatgtgggtttttttgtttgtttagttatatcaattactgatactaaaatctccagctgtttgtggaattgtctgttttttctctttaattttgtcagcttttaccccatttatttcaaactttgttgctagttgtttacccatatataatttctttgattttcacatattgatcctttgttataacacgtatctctgggcttactccgccttgaatgtacattatctgaggttaatatagccttttcctgtttactctgtgtcatgatatctctttgcatggtttttaattttaaacttgtctgtgtcatatatttaaaatggctttcttgtagataggatatagttgggccttgctttttttttctttggagtgtttagtccatcatgtaattattgatatgattggatttagggatggggttttttgctgtttgttttctatttgttctttgtccttgttcttctttgtctttcttggctttttttgtattagtttaatatttttagaattttattttatccattggccttctaaagcaaaaatatatttaccttttggagggagaagtgtttatatgtagattacaaattacttcctgaggccgggcatggtggctcacgcctgtaatcccagcactttgggaggccaaggtgggcagatcacctgaggtcaggatttcgagaccagcctggccaatatggtgaaaccgtgtctctactaaaaatacaaaaattagctgggtgtcgtggcgcacacctgtaatcccagctgcttgggaggctgaggcaggagaatcacttgaacctgtgaggcggaggctgcagtgagccaagatcgtgcctctgcactccagcctaggtgacaagagcgaaactctgtctcaaaaaaaaaaaaaaaaaaaatgaaaaaaggtagatctcttgcatccaagttggttcatttgcttcccctgtcctttataccaggggtcagtaaactatagccacctggccaaacctggcccactgcctattttataaataaaggtttgttggaaaacagccatactcattcatttatgtattttctatggctgcttttgcactataatggcagagttaagtagtttcagcacaaatcatctatcccacaaaatctaaaatgtttctgtctgagcctttacagaaagtgtgctgacctctgctttatgcagtagttgtcatatattttacatctacatcttatagccccaaataagattttactttaaataggttttgcttttaacaattctgtgcattttgaggaaactaaaataaaaaatggtattttataattaccctcatgtataccagtttgagtgtcagttttccctgaagatctgagtttccatctgataacattttccttcagcctgaagaactaactttagtttggagtgcaggttgattggggatcaattctagctttctgttgtatgaaatgtctattctaccttcattgttgaaggacagttttgcaggatacagaattatagattgacaggtttttttcttctattaaagacttcactgtctgctggcctccattgtttctgttgagaaatcagtgatggtcatttgaattgttcccttgtattcaatgtgtcatttttgagaccagccaccagcctgggcaacacagcaagacccttatctccccctaaaaaagaaactctaggttctattgttcctttgctcctccaaagagtactgtgttgtttaacaggcagtttacttcatacactgtgtttgcgtccccagccccccatttgcttggttcgtttattctccaggctctatggttgcttttaatatattttggtcagaatttgtagctgttatccatggaagaattgaatcaaaaggcacttacttggtattttgtggtgattcattttcaggttgcccagtctgccatattgctagaaaattaagttttattacacttataataaggaggaaaagatccatttctatgttgggaaatggttgtggggggaaaatgcaagggttttggagtcagatcagttatgaaatttggctttgctacctgctagttatgtgacattggttgttttcatttaaccttttttattttatctcaaaaatggggattaaaaacaccgatatgaaatgtttgtaagatctgagctagtcccactctacctgaaccatacacgtatttctttgataaaaggtgagactttgtcccacagggtccattttgtttaatttgctggaacctaggaatgaatatgcgttttcctttaagtttgtcagattcatccctgagaggtctgagatttaaagaaaaaatctattaccagatcacgtaaatgtttgaaatcattttaaaaaatcacttatttttccttttataggaatcacctcctcatgtagaaaattactgtctaccagaagctatttcatttattcagaataataaggaacttgggactggattatcacaaaagaggaaagctcctacagaaaaaaataaaatcaaacgacctagagtacactaatcgcatctaccctttagttaccaaacattaaatgtttttaaaaattgaaagcctgaatgtgactgtgatagatttgggtagtaatttaaagatgagtacctgaagaattctgcttcagagtataatgatgacccttcttgagttttgaacacctgaaattgtaatcactgaaatattaactgtttcttaataaaaagttacctgaaataacaacaaaatacaactcctcagctagcttgctgttaaaccacattgaagtctgttaaaagatatttatttttcttgtaaatatctgaagctgtagcttagtggaaattttagcaaggtaatggattttgctttaaaatgtctgccttacaaattcataacaacaagatttgtcagtcagcatttattcatgttttccctgatttttatcttctcaccattttacctcttttaacaggagcctgagcacaaggtttaatgaggaagctggggctataaatatgtgtgtatatatgtatatgtatgtttgtacaaatctccatgatgtttgccaagtttgaatgcgcaaaacttggaaaatgtgacaataaagaataaaagtagtaactcaaattagtattaagatgtgtttacatagataaattttttaaaagagcaccctggcatctgttcttctgttgaagcaacaaaacatttatgtaacgtaaaaaatgaattgcaggggcctgggtgcggtggctcgtgcctgtaatcccagcactttgggaggctgaggcaggcggatcgtctgaggtcgggagtttgagaccagcctgaccaacatggagaaacctcatctgtactaaaaatacaaaaaattagcccagtgtggtggcacatgcctgtaatcccagctactcaggaggctgaggcaggagaatcgcttgaacccgggaggcggaggttgcggtgagctgagatcgcgccattgcactccagcctgggcaacaagagcgaaactccatctcaaaaaaaaaaaaaaaaagaattgcaggccaggcacggtggctcatgcttgtaatcccaccactttgggaggccaaggtgggtggactgcttgaacccagaagttcaagaccagcctggacaacatggcgaaaccccatctctgcaaaaaatagcaaaaaattagccgggcatgctgtttgatgcttgtagtcccagctacttgggaggctgaggcatgagaattacttgaactcaggaggcagaggttgcagtgagctgaaatcatgccactgcaactccagcctgggtgacagaatgagaccctgtctcaaaaaaaataaatgaattgcttaacatttctgatatttgttatttagaatattgccctattagattaaaacatactgttattggaactctgtattgcattagcctttattatgctaaacctaaacacctaatactacatgcgttaccagaattctctataaatacacctaatttcattttaaggacaaactagaatccgttaggaatgtaattttgatgtaaaccgttcaattccaaatgactttttgaaaggcagattcaaacagtgaaggagagagtgctcaacttggacacaaaatcccttaaattttcatcagattttcttcaaaatggagttgagggtatccctgctgctagaggattggtcctacagggttttcagctttgagctagttcacagcttaggacaatacaaattctacacagagaaataggtagcattatgatgtaaactgtccccctcccaccaaacaaaaaccacatgggcctgtctttatcagagctattttattttagctgaatcattttgtagattgtagtacgtttccctgaattttattactcagaatcctttgaaataggccaggcacagtggctcacacttgtaatcccagcactttgggaggccaaggtgggcagattactttaggtcaggagttcgagaccagcctggccaacatgacgaaactccatctctactaaaaataccaaaattagccaggtgtgccggcacgtgcctgtaatcccagctacatgggaggctgaggcaggagaatcacttgaaccaggaggtggaggttgcagtgagccgagatcgcaccactgcactctagcctgggtgacagagtgagactccatctcaaaaaaaaaaaaaaaaaaaattctttgaaatagttactttttaaattacctaatataccactttcttttctgccaaaattatgaatggttttccagttcaaacttagacacacagtttaccatttaaggctccaggtctcagtttctcctcctaactttccagcatctgcccatactctgtataagccacttgaactctggctttggctgttaatctgtaaatgtcctaatgccagcaacaatatcctcttatatacaaataattccaagcataggtagtcttcttgtttaaaaaggggagggggcagaacttgccttgattagattagtatgagtttcttttctgaatggctacgatattttaatctgtgatatttaaattatcaccttatatccctccacgaattttcctgtgcattagtctgatctcaccaacattcgttaattcaacaggtaggaatcctcaacctgtgcctaggattcagcaacaaaccacctggaacacatggtcccttagcacttgaagaggtaggaatccttactgtaaatacagtactcaattatactcagatttagtatttacactgttaaggactgagcttgtccccctaaaattcacaggttaaagcctaacctgctatgtgactgtagacagagcctttataaggggattaaatgaggtcataagaatgagtccctaacccaccaggactagtgtcctggtaagaagagggaggcacaccaggagtttgccggcacggaggaaaagccctgtgaggacacggggagggcagctatctgtttacacaccaggaagaaatgtctcaccagataccaaccctggccgtctcctggattttggatttccaatctccagaactgtgagaaaataaatttctgtttaagccactcagcttgtgatgttcctttgtggcagcctgagcagaccagtaacaatattaacagtaataaggttcttactttggggcctgagatgcctgggaatggaacaggctgttttgtatatgagcatttttagggtagagttcataattctagagtttggatctgtgactttccacccaaaagtcacaaaccactgctctaatgcaaacctattatttcacatttacacctctcacctagaagtgctttaatacaggctgctttgtatcagggcttggtttccttctgacctttcaagacataaaaatcattactagcttgaggccatgcaaaaataagcagtgggccatagttgactgttccttattttctatccctaaaaagattttaaaatctagatctgtcaacaagcaaggcacccagctcaattttttttttcttttgagacggagcctcgctcttgttgcccaggctggagtacagtggcatgatctcagctcactgcaacctctgcctcctgggttcaagccatgctcctgcctcagcctcctgagtagctgggattacagacgtgtgccaccacgcccagctaacttttctatttttgtagagatggggtttcgccatgttggccaggctggtctcaaacttctgacctcaagtgatctgcccgcctcagcctctcaaagtgctgggattacaggtgtgagccaccgcgccctgccactcagctccttttctaccatcctgagtagcagtctatggcagacatacttgacaacaactcaggcataccctgggaagtgaccctgtggtctaagaagaatgtatgtttggagttccaagttaaggaatccaggagtggccagtccagagactgactccttatcatcaatgacggatgtccatacccctgccccattccttggaatgcaggctgtataggggatggtggccctttgtattgggttaagtggaagttgttaggtagaggttgctatgtgaaaatgacatgttagactgcatgcttttaaaaaacagtagcaatttttggccgggtgcggtggctcatgcctgtagtcccagcactttgggaggccgaggcgggcggatcacgaggtcaggagatcgagaccatcctggctaacacggtgaaaccccgtctctactaagaatacacacacccaaaaattagctgggtgtggcggcgtgcacctgtagtcccagctgctggggaggctgaggcaggagaatggtgtgaacctgggaggcagagcttgcactgagccgagatcgcgccactgcactcccgcctgggcgacagagcgagactccgtctcaaaaaaaaaaaaaaaaaaaaaaaaaaaaaaaaaaaaggagcaattttcctgtccagcccactgctcctggactgttgtgtaatgtaagtccacaataaaccctatgtctcattcactggctccacatctcttcttcagcctccctcacgtggtaccatccccactagagtcaatagcagtctggcatgacaagtagtagcattaagcagagccatctcatgcttgtttaacatttggaaatctgcaatgaaaattatcaagttttggctgggcgtggtggctcacacctgtaatcctagcactttgggaggccgaggccgaggtcaggagttcgagaccagcctggccaacgtggtgaactctcatctctgggagaaaaatacaaaaattagctgggagtggtggtgggcgtctgtagtcccagctactcaggaggctgagacaggagaatcgcttgaacccgggaggtggcggttgcagtgagccgagattgtgccactgcactccagcctgggcgacagagggagactccgtctcagaaaaaaaaaaaaaagaactttctgctgctttgaggggagactgaagaagtcaggctctaatgcatccctgctgaccttgggatgggaacagggcaaacagcattttcaagtcatttcgaaggagcatttggttatcatgttccttctctacccttacttaaatctaaggtgaagagtggaagcaaagcctcatggttaaaaacatgctggagccaaaacacctgggttggagtcctggctctttcattactagctatgactccagcaagctatttaacctttcagaacctattttcccctctttaaggggctttcagggttaaacgagtcaacatttgttacctgttgcctggctcaaggttaaaaactatacaattttttaaaattccagtaagtgatttaacacttttgccagctggagctaaggttttaaaaaaagaagaggatgtcaggacagaacaaaagaatataatgggagcttgcaacctcctcttcactcccattaccatggtgccactgaggttgggagtccctgacttccctgtttaattcaggttctaattaaagacatacatttgaactgtaaaatcagagaaatccaataaggaagccatagtagtcccagcaatttataataaaaccaaagacaaacctaagagattccagtctgtgcccacacctcattatgaaaagatgcttaagtataacccacatgatctttaaaaggcaggaactggtgagtaaggtgagtcacagacccagagtgtgtaggtggtacaagctacacttggcctgaggttctgattcttaaatagatgagctatatgattctgcggctgccaaagcttatctctggtaaggttaattatggttgaattcatagtcaccaggaagaatagcagaattctaaagaaactcttaaaacccagaggtgctataactgagcaacataatgaaagggcaaatttaaagtggccaggggtagtgtaaggcagattaacatttacagtgagtaaactcaggaatggtcagatctgctgtcaaaagacaagtcaaacatcatggaagtattgttggagaaggataacgagtagctacagaagttacattgatgatgaggcagttatctaagaaatgacagataagatattaaaaatggtctttatatactgataactactgaactacaaaaatgtgtagttttgtaaaaaatcaaagaaatttactatttcagttgacaagtctttccctccaacttcagtatccactttccctcatttaacagtatccaaaaatgcatttaggaatatgataatcatttctggtctaagcatgcaatttaagggatttcctgcttgagctagccctatggttgtcttccaactgcctactagggaaataatttatcattttttgacataacccagtggttcccagattttgctgcacattagaactatgggacttgaaaaaacattcctctgctcgggtcacactccatactaattaattcagaatgtctggatgtgggagtcgggcatcactttttttttttttgagacggagtcttgatctgtagcccaggctggagtgcaatggtaccatctcggctcactgcaagctccgcctcccgggttcgagtgattctcctgcctcagcctcctgagtagctgggactacaggcgtccaccaccgtgcccggctaatttttgtatttttagtagagatggggtttcactgtgttggccaggctggtcttgaactcctgacctcaggtgatccgcccacctcggcctcctaaagtgcagggattacaggcgtgagccaccgcacccagcgagttttttttttttttttttttttttaatgattcccaggttattccaaaatgcagcagtttgagaaccatggacataatcttacagagttgctccacttcttatgattaaaattgcgaaggctgggtgctactctccatcatatttggagatgaaccattttacagaggtttcttggggcatgctttgactggatccctgaacagttaggttgagggattaaaaagacttttaaagtggatgacttaaatcctacccatcgtctgtattactatatccaattatttagaattctagttcccacttgggctgcaaattcaaaagaattgaactgccttaatgattacttttatgtatatcctaaattcctgatgtgaacataattcctattttagataatacaaataagattatttaaagcaattatttctaaggccaggtgtgatggctcacacctgtaatcccagcaatttgggaggccgaggtgggcagattacttgaggtcagaagttcaagaccagcctggacaacatggggaaaccctgtctccactaatacaaaaaaaaaaaaaaaaaattagccgggcgtggtggcatgcgcctgtaatcccagctactggggagcctgaggcataagaattgtttgaacctgggaggcagaggttgtggtgagctgggatcgtgtcactgcactccagcctgggtgacagagtgaaactgtgtcaaaaagataaaataagcaattatttcttactcaatatatcactcataatattcattatctttatttcaagcccaggagaagcaattcataacttgcctgcattctgcaggccccattagtacctagttgtagtaactggtgaattaaaaccattacaaacctgcagtttcaggatgctagttattagaacacctgtccatatgactttctaacttcttggctctccttctgatctgactacctccattaatttgtttgcactccctaacttgaaatcgtgacctcatttgttcctttgtcagtctagacacccatagcatgacctgtcctaaattcctaccccacactcttaacctcctgacatctccacctacgtgtacctaccccagaccaatttcacattctaacagagggagataaacaaccaaaatgtttagtgtgctaaataaagagtaagaactacaagccaggcatggtggttcacacctgtaatcccagcacttcgcgaggctgaggtaggaggataacctgagctcaggagttttgagattagcttgggcaacatagcaagacctcatctctactaaaaataaaaaaagttagctgggtgtggtggcacgcattttagtcccagctacttgagaggctgaggcggggaggatcatttgagcccaggccaaggctgcggtgaactatgatcacactactgcactccagcctgggtgatgctgtctcaaaaacaaccaccaaaaaatcccccaaaaactatgagtcttggtgctgagcaactggtagtcacatgcagaagaatgaagctggagccctaagtcacaataaaaaaaattaaaatagaccaaagacctaaatgaaagagctaaaaacataaaactcttagaagaaaataggcataaatctttatgacttgggttaggcaatgttttcttagatataacacccaagcacaagcaactaaagaatagaaaaggtggacttcatcaaaattgaaaattttgtactccaaaagacacttctaagaaagggaaaaatggtaggagaaaatgtttacaattcatgtatctgacaaagaagtagcacctgaaatttaaaacacttgcaactcaacaataaaattataagtaaaccaatttagaaattggcagaggatttgaatacacatttttccaaagacatacagatggccagtaagcacatttaaagatgctcaacatcactagtcattataggaatgcaaaataaaaccataatgagatacttcacacccactcggaagactagaaccaatctgaaacaagtgatcacaaggatattggagaaactggaatcctctgacactgctggtgggaatagtaatatataatatggtgaggctactttagaagagtttggcagttcctcaaagtgatacagcctttcatctctaagtatatacccaagagaattggaaatgttgatacaaaaacttgtacatgaaagttcatagcaacatcattcataataatgaaacaaccccaatgtccaacagatgaatgtacaatttaaacgtggtatacccatacaattacctatattgtttagcaataaaaacgaagcactgatacatgctaagcctcaaaaacatgctcaaaaacaagtgtagaagccagtctctgaaaaacaaattgtataaccctgtttatatgaaatgaccagaatgagaaaatctaggccgggcacggtggctcatgcagctgtaatcccagcactttgggaggccaaagcgggtggatcacctgaggtctggagtttgagaccagcctggccaatatggtgaaaccccatctctattaaaaattcaaaaattagccagtcgtggtggtgggtgcctgtaatcccagctactcggggaggctgaggcaggagaatcacttgaatccgggaggcggagggtgcattgagctgacaatgtgccactgcactccagcctgggtgacagcaagactgtctcaaaaaaaaaaaaaaaaaaaaaacagaaaaaagaaactagagacaatacaatagtggctgcctaggactgaggaatttgggaggaaagaagaaaatgatgactaataacaatagaatttctttttggggtgatgaaaatgttcaagaattttaagagtggtgatggttgcataactttgagaatataagaaattcttaaattgtacacttcaaaaggtgacttttggccaggtgtagtggctcccaaagtggctgtaaaacattccagcactttgggacgcagaggaggactgcttgagaccaggaagcttgagaacagcctgggca

SEQ ID NO: 311 - DNA, 21691 bp, Homo sapiens
aaagaggaagggaccagcttcacagaggagagaattactacaaacaatgacacaaccacaaagacactggtctctctactggcctgacctgaatttcttacacatgatcaagttctgggatcatgccatcaatcacactgaaaaatgtagtgggaaattctgcagcgtcagccctcaactactgttccttctgtgtattttctcaagtcattaattctttcaagacaatgatgaattgataaggacttaagaaagatataaataactgaaacttatttatatctagatcttctcttctagattataagggaattgaatgcaggaatcacaaattactcacttttgaataaagcactttgcccgaaatatagcaaaataagtgcttcatagatgaggaaagaaagagagggagagggccgggcatggtggctcacacctgtaattccagcactttgggaggctgaggtgggtggatcacgagggtcaggagtttgagaccagcctggccaacatggtgaaaccccgtctctactaaaaatacaaaaattagctgggtgtggtggcgggtgcctgtaatcccagctactcaggaggctaaggcaggagaatcgcttgatcctgggaggcagaggttgcagcgagctgacatgccattgcactccagcctggtgacaagagcaagactttgcctcaaaaaataagtaagtaaataaataaataaataaatgaaagagagggagggaggaaggaagaaagaggggggaggaagaaaagaaggaaagaaaagaggaagggagaaaaaagaaggaaagaaaaaaaagaaagaaaataaatttgattagcgatggtaagggagggtgatggtgatgggcagtactgaacctggcctgcatcacaggaagatatatgttgtcatagaaggaagtcaccttgggagctgttcatgtttggggaatagtatatgtataagctcaagctacttgctggccaaggctaggtccttgatttcttttgacattcagaagttagactttttttttttttttgagacggagtttcactgttgttgcccaggctggattgcaatgaggcgatctcggcttactgcaacctccgcacccccgggttcaagcaattctccagcctcaacctgtagctgggattacaggcgttagccactacgcccggctaattttcgtgtttttagtagagacggggtttcattattttggtgaggctggtctcgaactcctgacctcaggtgatgcgcctgcctcggcctcctgaagtgctgggattacaggcgtgagccaccgcgcccagccagaagttaattctttaatagcagtgtaagtagggggtaggaaaagagaaactttaatggggtaactgtaaaggaaaagacgaagaagtctctccatttactggctggattctatctaccccatatggctaccaacatttgtctgagtcatttcctcaatggttgtgacagctccctcttctgcttttagaaggaggaagtagaaagtttaagagcttactttagaccaccttttgcatatagaattcatttcattttcaaggccccaagggtatttaaatgggctttaaacccatttaaacctggctttcgcctgggcattttggtctccacccctatgataagacagtcccctccttttatcagggatagaagctaaggataaactgtatcatcatctagactcaagtcagggcgttaagcaatgtgctgagcagctaataatgttgactctcttccctccatccccctatcttgtaagaaatagtatacccactttacagattagggacttgacgataggatttattgaacttgaccttggtaaacataatccagagggtggagttcagacaaaatccctttctacctaccaaccagcctatgaaagatcttttagtaaatgggacctaaacttcaggctcactgctcctctcactttcacaatcaaccggtaaagaagaaaagtaatggttgccactccagagggggtggaagtacagaagcgatcagaggagaggaacaatctttaacacagttggcttaacgcagtgcctgtccgtttcgcgacagttcaaacgactactatggggccacggtttgttctgggccaggaaacacacgtgcatcctgcgcatgcgtccaaaaggaacccactgcccctcctgctggacctctttagccaagtcatcaaccagccctcaacatgcccgccctcaagactaaaccctcggccaatcgggaaaccggagtcgcccggcacgtcacttattttgcatatgccctcctctccccgcccccatgcttggactccgccccgtctgggtcagggattgtcacctaagagcttcgtcctggcacctgattggctctctttccagctccgcctccatctcctcccgccgcccgccccttggcgatcccacagcggcaggcagagcaaaatacgcaggcgcaggcgcttcctctctcttctagcggcccgccctccctcctccctctccctcccctccccactcccttcccctcctctccaggcctgcgcgcgcgcctcttcctccggcacgcgccgctgctagccgagcactctcgccagaacctctggctcgcgcgtgccttttcccctcaggttgtggggagagcggaatcctgctccgccgtcgcagcagcagcggcagccccggcagcctcgggcgacagcggcggcgcgcgagcccccgggcggaccgtaccaccgctcgccagcacgcagggggagccgcccgtctcgccgcgcacgcctcggcgaccccgcggggctgaggcgtcgccgcgcccggcagcgtgagcgcagagccggcctcgaccccgagctcggagccccgcgggccgcgcccgccgccggccccacccatccgggtcgaggaggccgaggccatggctgagacggaggagcggagcctggacaacttctttgccaagagggacaagaagaagaagaaggagcggagcaaccgggcggcgagtgccgcgggcgcagcgggcagcgccggcggaagcagtggagccgcgggtgcggcgggcggcggggcgggcgcggggacccggccgggtgacggcgggaccgccagcgcgggggctgcgggcccaggggccgccaccaaggctgtgacgaaggtgaggggccgggaggccggcactcggggcccgggccgcgcgccggcgccccatgtgcccgcccccgcctgccggggaagcgtccgggaggggccgcggaggccgggcggacgggcgcgggccgccacgtgacgcaggctctccacctcgggctgggctcgccagggccgggaccccttccgatatccgcggtggagccgcccttcccaccccgcgtcgctcggcgttagccaaggcccgggcggcgccaccctccgggggcactaggtctggggccgcagtgcccagcacagagcagcgtttatcgggtgacgtctaggctgagtaattccgtgtgctgacctcagcccagtagtttgagctgaattttcgctttcagcagccgcatttgtagcagctcttttgtgatgacttagtctctaagcccgtgaaagaaaaagaaaactctcggtggcaaggttgaagtagaaatgtagttgtgaaattcctattgacttcttccttcggcttttcttagttgcttaaagtaacagctcccatgcaggaacccagcggaagtatagtgttagcctacgagcatgtttgtcctccatttagcctagtttgccccagaacgaagcaagggctttgaccagaagacaagtacatacttagtttaggttccagccacttgatccacttttcgtagtgtgttatttgcttagttatatgtctacaaatagctttaattgatcaaatggcgtttgttttacaggacgaagatgaatggaaagaattggagcaaaaagaggttgattacagcggcctcagggttcaggcaatgcaaataaggtatagtctggttacaaatgtgtttagataacctttgggatagatattggatacaagttaggttttcctttggccccaaagcagcatcatagtagccttgtgctctagatatgcttattaggactcaaatgggttctgtctactctttctcactccatggaggcagcccttccgtgtgctcatgaaattagctgctgactctaaaatcctgtgagagcttgcctacttccagttctggttaggacttttcatttgagacagctaaagtggattttgtcgcttcaaaatttttacttttaacatcggtgattgtacttagttttggtttcaaaagtaatgtggatgtttttcacatcctctccaataagcaagtgaatatatgtttttgtaattgaagtatatcatacttacagagagatagaggttttatgtgttcacacagtgcaaccaacctgtgcaataagcaccaggtcaagaaactgagtattactgatacagaacaaggttcccctcctaacacatactcactgcattcaccttcaacataaccactattctaacaccataattttttctaaaacttcataggaatggaattatatttgtaaacatgttattttttaaagttcaaaaaaatagtaatttttaaaaattgggtagtttagaagatttgaaattaacattttgtcaagtccagtctatggcagtcaactttaaggttgatgttaagtaagtgctatattttggagggttcataaagtaggaaaaaacaaatgaagatatggttctgctgtaagatgaaaaaatcctttgctcccggtttaaagaaataaaggatcttgataaactgtctccagtttgaaggttgcattttataggcaatgccagtgagtgcgaggcacagtggaggaaatactttccttaactgaaaactgtcttttgacttctctggatgttagtatctatagctttagataacttactcaaaaagcagggttaatattattgacatttgttgaacacctaccacagctaggcattaatgtcctactgtgaaaacatcattttgtgagcttaaccaaagtgaaacccccagattgataatgggaaactttcaggaacgatggcttctccactcttgagatttctttgtagtggtgttgagtagaagtgattagacttgagtttgattcccaaccacttgttggcttccttaatgtgtctttctcttttctgtctcctggggcttgacctgtaaataatggggaggagggaatgtgaggttcttaccatttggtgttgtggaactgcctgtgtgtgtggctccggttctgttgtaaagtttggctcttcttaagtcttttctttcctaagtgactgcaggttcttgaaaacgtgagtgactggaagaatagtgtttggccatgttgaacttggcaaaatagcacttttctgaagataaaattttggtttcaagttcactgaggattagaaattgattttgttaaactatggagattatttaaacagaacctgtgtttttctgttactgactataaattacatgttcatcttcagggttattttgatcttgatctattttggttacttttgagatagtgaaaagtgtcttaaataacttacatacttcacccttgccagggatataagtaagtatcagctagtacaagcatttaagttctgttcaacctgaaggtagactagctttttttttttttttttttttttgagacgaagtttccctcttgttgcccaggctggagtgcagtggcaaaatctcggctcactgcaacctccgccttctggtttcaagcgattcttctgcctcagcctcccgagtagctgggattacaggcgcccgccaccacacctggctaattcttgtatttttagtagagacggagtttcatcatgttggtcaggctggttttgaactcctgacctcgtgatccgcccgcctcagcctcccaaagtgctgggattacaggtgtgagccacagcacccggcctagactagcttttatattgttttttttgttttcttagcatctagtcattggccctaagtggccatcctagtagaggtattccactaacctgcaacactgagaaacactccttcccatatgttcttcactcagatccaccagtctctgctacatgtgctttatctttttctatttctcggtatactgagagctgcagatgtcacattcagtctttttttctttttttttttttgagacagagtttcgctcttgttgcacaggctggagtgcaatggtgcgatctcagctcaccgcaacctcagcctcccgggttcaagcgattctcctgcctcagccttccgagtagctgggattacaggcatgtgtcaccacgcctggctaattttgtgtttttagtagagacggggtttctccatgttgttcaggctggtctcaaactcccgacctcgggtgatccacccacctcggccttccaaagtgctgggatcacaggcatgagcctctgagcccagccagatgtcacatacaatcttaaagttcttgaccctggtccttatagtagttagcatattagttctttacctgtacatttgaaaggggaaatttttcattagcagcaaacgtattatatattaagatcctatttcacatttaccaaccagctcaagatttaagtaccaaggtacttaatgtgcccagttttgtgtctgaattaacagatcttattcaaggtcatgctgttatagacagattcttgagagggaagccattgaggtggttataaaggaggctgtcatttgagttagatccttggttgtttgtaggccctgtaggcctctttcatctctattttttcatttttttgagacagtctcactttgtcacccaggttggaatgcagtggcatgatcatagctcattgtagtcttgaactcctgggctcaagtgatcctcccacctcagcctcccgagtagctgggactacaggtgtgagttgccacccctgactaatcttactttttttttctgtagatgaggtctattttacctaggctggtctcaaaactcctggccgcaagtgatctcaaagcaaaggaatcacacgcatgagctgctaggcccagccacttccatctttaaagtggatttttgggagaatgttagaaagatttaattcttgaaggtatacactgttgagcatttgtcacgtttcagtaaataattgagttcttggagcccagtggttttctagaaactttggtgagaaatctagacttaaaccttttaggtagagctggttacattatccaaggtggatttattctagcaaatacttatgtgactactctgctagacactgaggttctctggttgtagaaataagtcatgctgtaatagacaacagtagataatttcaaagagatgtgcatggtgctctggggcagaggagagacatttcatcatccatgaaggggtcaggaaagattctttggatgaggtgcagtgccattttaagcctccaggccaggcatagctgatcaggccatgtgtatctccccattttactgttgcagcaatgctaggtataatagggacaaacctgtggagatgcccggtattccagcagctcaatccagtctgatttttgttttagctgcttccccctagtgttggggaaggggagttaggatgtataaattctcatgtctcttgaggtaaagagataaggctgttctattctttataaatatactgctgcaggatgtgtgatcctatcagccttactaaagaaaatgcatttctcaaatcttagagaatatttttgcatcataccttagagctataaaggggataaaatgaattaaaaggtaatgtgaaataatagagcctctagaatcccacactattttggctctgctactttgtagccctggggaaggtacttatgtttcctcatacatacatacagtgggtctcttggctgccttagtgttactgtgaggtttaactttgtacagtggggtggaatgctgcctgctgtagtagatattcagtaagtctcccttttgtagcatcattattctcctcaccttaccagtagtgccttacagacttacacatatttaagaccgtatatgtggaattgtgatgaatttacagcagtattgtagtgtttgtttataaaatttagctgatgggaagctatatattatatttgggtcaaacactgaatttcagcctgtctcccatggaaataaccgtttggaacgtgtttcttgttctgctatgacatttggagagttgatactttctgaaatatgtaaagatgaaaaagtaataaaatatgtaaatcatttctaccctgctaactggcatttaggcaagcctctaagcatctctgggcttcaattccttcaattgttggatgaagagtgtttttggtttgttcgttcttttttttttttgatagagtttttgcttttgttacccaggctggggtgcaatggcgcaatctccgctcactgcaacctccacctcccaagttcaagcgattctcctgcctcagcctcccaagtagctgggattagaggcatgtgccaccacgcctagctaatttttgtatttttagtagagacagtgtttgaccatgttggtcagggtggtctcgaactcctgacctccagtgatctgcccgcctctgcctcccaagatgctgggattacaggcatgagccactgcgcccggctgataaagagtcttgactagacaatttccacatgtttagtttagctagtatttcagaatcttaacccaaaatacttatttatttttattattattatactttaagttctagggtacatgtacacaacgtgcaggtttgttacataggtatatatgtgccatggtggtttgctgcacccatcaacttgtcatttacattaggtatttctcctaacgctatccctcccccagtcccccaccccccaacaggccctggtgtgtgatgttcccctccctgtgtccatttgttctcattgttcaactcccacttgtgagtgagaacatgcagtgtttggttttctgtccttgtgatattttgctgagaatgatggtttccagctttatccatgtccctgcaaaggacatgagctcatccatttttatggctgcatagtattccttggggtatatgtgcaacgttttctttatccagtctattattaatgtacatttggaaaaacccaaaatatttatttaaaaaaatttcttttggccgggcacagtggctcacgcctgtaatctcagtactctgggaggctgaggcaggtggattacttgaggtcaggagttcgagaccagcctggccaacatggtgaaaccccgtctctactaaatacaaaaaattagctgggcatgatggcgcatgcctgtaatcccagttacttggtgggctgagatagaagaattgcttgaacccgggaggcagaggttgcagtgagccaagatcaggccattgcactccagtctgggcaacaggagtgaaactccatctcaaaaaaaaaaaatagagacagagtctcactgtgttgctatattgctcaagctggttttgaactcctggcctcaagtgatcctcccaccttggccttccaaagtgctgggattagggcatgagccactgcacctggccaagaatccaaaatactaaattgtctccttgtgccttttattattgatgtacaatccctctaattaaacagattatgcttattttttggtaatagtttgtaaactaggtgtattttaaatttgagattattttattttttaatttttttcctaagggcaaggagatgttagacactagacagtaaaaaaaaaacttccagttgagatactgtcactattccatcagaccaaataggagtttttatttaaaagctttctgtgaggctgggcgtggtggctcactcctgtaatcccagcactttgggaggcagaggtaggaggatcacttgaggccaggagttcaagaccagcctgggcaagaccctgtctctacaaaaaaatgtaaaaaagtaaaattagccaattgtggtggtctgcacctttagttctagcttacttgggaggctgaggtgggagtatctcttgagccctggagttgaagattgcagtgagctaagattgggcctctgtactccagcctgggtgacagagcaagaccctgtctctaaaaattaatttttaaaaataaaaaatgattttttatgtaggttataaaaataatatgcttgtttttagaaatttttttgagaaaaatgtagaagcataaagaaatatgtaagaattatctgtagtctcttctatttagggataatcagtaaatagtgctgattattatggggttgtcacctccattttacataagaggaaattgaggtataaagaaatgaagtgccatgttcaaagtttcctggctggtaagtggcagagcctggatttgaaccaggaagcctgactttagaatctgctcctaattgcttgctgcatgaagaagataaagtcatacattctagcacccagagctactctataaaactttttaaaattgttgtagatgtttttgtatttatattaggtatatagatgttgttttagtgaattttggtttatatgacatgaatactacctccatgtcagcatagggtttacattttaaatggctgcatagaattctcttacatgttaacgaaaaggaaaactgagagatggcttggctatatttttattttaaattgcatttttttctttctcagacctcttagggatgaattgccatattctctatcctttttcctctcagataaagttgtaagtaaaatcttgctgtaaatgtagacgagataaatctgttcttctttccactcttcctcattgtcactctagcctccaaattctgcagtcacttctggttggtaggtaattcatacaatgctgccattattttttattttttatttttgacacggagtctcgctctgtcacccaggctggagtgcagtggcacagtcttggcccactacaacctctgcctcccaggttcacctgattctcctgcctcagcctcccaagtagctaaccggcatgtgtcaccacacctggctaatttttgtgtttttagtggagatggggttttgccatgttggccaggctggtctccaactcctgacctcaggtcatcggcctgcctcagctcccaaagtgctgggattacagttgtgagccactgcgcctggccagtgccattatttttgaatggcattttgccacttacttttttcctaagtatctttaaaggagactgtcaagctagtcaagaactttgtcttatagccagcatgtgtcttgttttaatagaaatggaaggaaagcatccttagatatccttttgcagaagccaagagaggctgtgatgttcctaaggttatacagttaagagagtcagggtgatgagtagaaggcaagggacagagttttgggaaccagccttttttttataggaaggtggggaaaaggtagaatggtgaaggagttgagaagcttgaagacctaggaaaagccaccattgtcatgaaaaataattttatgaaaatgttggtagtttctgccaggtgtatcttcgaggtgaagagttgcaaaaaggacgttcgatttagccattattgtgctttaatatccctgttgtcagtatcccttttgtcaagagacaaaagataaatacacttggtaatttaggacatgtaaagttacacaaaataataaaaagtaatccagcaaaaagagaaataatcaaagatgccttggagaaatagattatgactcaagtcaattcaagaataaattaattagcattgagaaaatactgcaagcagtcttaagatggtatgttaccactgagggtatcttttccatttataacatctggaaagccaaagactgagatcttatatattttttttaaacaggtgataaatacatgtctggtgttaggggctaattctatcctctgtaaacactggacacagacttgttttcatctgctggaatgtgaattctaattctgagagtattttatgtgcgaaaggattggcaaataaaattatacaactttcaaaactcttcatttgctcactaaaaatatgcttaccttaaatgcctgtttgtacactttggtgcaaggaaaattttgtaattgtgctcttaatccttcagctcaccttcttctctgcatttcaggttgtatcatcctctcttccctcccttagtcgcttgaggtggtaactggggtcttgctcttatgtggggctgctataaatgatcaggcatattgtcacagaggcacatcaggttttttttatttttatttttttgagacagtcacgctctgtcgcccaggagggagtgcagtggcacgatctcagctcactgcagcctctgccttccgggttcaagggattctcctgcctcagcttccccagtagctggcattgtaggtgtgtgcccccatgcctggctcatttttgtatttttagtacagatgggtttcgccatgttgcccagcctggtcttgaacacctgacctcaggtggtgcacccatcttggcctcccaaagtcctgggattacaggtgtgagccactgtacctggcctcactttttaaataagacgttcagtctcgaaagagattgacttcttcagggtcgtacagataatcatggataaaactaacgatttggactgaaaattttcttggtgattccttaatgaatttacatctttgcttttccagcagtgaaaaggaagaagacgataatgaaaagagacaagatccaggtgataactgggaagaaggtggaggtggtggtggaggtatggaaaaatcttcaggtccctggaataaaacagctccagtacaagcacctcctgctccagtaattggtaattttactatttcagtttcagaaagatgtctaatttatatatgattttatatatggtccactttcaactaagtgcatgattgtggtagggtgaggaggagaggctcctttccattcctggtagagtgggatgtgtatatatcttgttaaagactttaaaatcctaaataaaaggaatctggaagttaaaagacatgcttttgtcctgtatgttgctgtaaaatttatatagatatagactagtcgattccagtttcatttattggaattgagcatttcttctaatattctcgttaaatattaactacttgctaatggaggaaaaggtaaggaaaagactttaatttactagaatccaaggtcagcttcatttaggatttttagtggtaactaccctagggttgggtttaactccaaaagttttcatgagagagaaaattcctaaagcttttatcatttaaaatatttttgacagctgagtaaagacagaaagacaaggggcccttgtctttcacttgtgctttgtctttttcattccctatttaactttcctgttctttgaagcatgaattctcagcagggccaattttatcattctcaaggtggtaaaagttgcttcttatggaatgaaggaatcttataccttaacagtcatttgtggcccacgaaaagactagaatgcataaacagatgtatagtatatcgcagtattaaaatttcatggagtggggggcagttaggaaacagatgtctgaaaggtctccttagggcaataatgaaagtttaagagcactactttaaagaagtgtatactcattattttatttagaatgttataaagaataacatatcactccaaatcttgttatgcagaaatcacagataactactctatgttaaatttttatttttatattttttagagacagggtttcactctggcccaggctggagagcagtcatgcaatcatggctcattgcagcccctcaactgcttgggctcaagtgatcctcccaccccagccttccaagtagactaccggggcatgccacctgtttattttattgtagagatgagatcttaactatgttgcccaggctagtcttcaactcctgggttcaagcaatcctcccaccttagcttcccaaagtgctgggattgcaggtgtgagtcaccacacccggtcttatgtttttaaatcatctttagaatctttttgttttgtttgttttgtttgagacagagtctggctcctgacttcaagtgatctgcccgcctcggcctcccaaagtgctgggattacaggcgtgagccattgtgcctggctagaatctttttttctttttcttttttttttttaagacaaagtctcactctcttgcccaggctggagtgcagtggcacaatcttgggtcactgcaacctccgcctcccgggttcaagctattctcctgcctcagcctcccaagtagctgggattacaggcgtgcaccaccatgccccgctacatctttgtatttttagtagagacggggtttcaccattttggccaggctggttttgaactgctgacctcaggtgatctgcctgcctcgggcttcccgaagtgctaggattacaggcttgagccactgcacccagccctggctagaatcttaaaaaataaccacactggcatttcattaaaaaattctttacatatggcatcttaatcagtccaccaatcaggtaaagaagtaattcatatttactggtagggaaacaggactaaagtcctattctgagaggcagtccctgatgagaccagtcatccaagcccagcagattccttttctacttccagtaatttggcttgtggaactcatcatttacgtagattactaaagttgtacgtggaggaggagttagaatactaccctagaaaaatacaatgttttcacttttcttttttcttttttgagagccggagtctccttctgttgcccaggctggagtgcagtggctcaatatcggctcactgcaacctctgcctcctaggttcaagccattctcctgcctcagccccctgagtagctgggattacaggtgcctgccatcatgcccagctaagttttgtatttttagtagagacagggtttcatcatgttggcccagctggtcttgaactcctgaccccaggtgatccacccacctcggcctcccaaagtgctgggattacaggcgtgagccaccacgcccagcctgttttcactttcagacattttctgaaatgaattcccttctgtggtctgacccagagaccctggtattgttttttctataattgttaaatgattgggaatgcaagaatagcttattaaaatgctgagcatttaaatagtttatctaaaaattgttataaaatattagttacagaaaccccagaaccagcgatgactagtggtgtgtataggcctcctggggccaggttaaccacaacaaggaaaacaccacaaggaccaccagaaatctacagtgatacacagttcccatccctgcagtcaactgccaagcatgtagaaagccggaagtaagtactataattaattgcattttgtttgggacttctgttcctaggccagggagtgggatataggggatgtgcatacccacccaagggagagactactccttaactaataaagcctgagcttcagctgacaggcaggtgagaatcagggtgggacttcatatgtccagaagggaggaaagggggagggcaaagagcattggagacactttgtcttctgtctgcaaaagtttatcttagccctggtttatgttgttttatagcaatgacaagttttaatgtagttaaaattcttttataattaagtggcttttgctccttataatatggaaactagaaatataaaagcgctgtttaattgtattcccagttaatgtgactatagacagaagatgttggcatttataaatctaatattaaaataatcttatttcagcaggtacttaaaatgaatgctacctggaattaaatgactacatatggcacatctacatcttactttagggacatgaattttttaaaataaataaaatgggaagaaatgtaaatgacatcagatggaaatgtgttttttggggtggcttttagaataaatcccagccttttcaccactttgagagcacagctggcttgaatttaaacctccacgtggacttgctcctctgctctgtcttaaaaaatgtgtaagggaccttgggagggcagtgattcaccacactcgagtttctttacctgatctaatcagatccactcccacaaaatcgatgtgaggagaaatcattgactaatgagtagaatttacttgaatgagaaaattgttacccttgtgcataaagagagagatgtattatctattacttgctaaaagtaagagtcttaggaggaatgtcattacacagcttttaacagttttcttcaagtttgtcctgaaatagggtcacagttaatactgttcagtagaagataggaccctagagcttcaatacagcgttctgtgttttctgtttgaattgaagccttaaaatggtttgataaggattttctatatgcctccactcctacccctccccaggattcttctaaggggtggcttttttttaaattcaaggacgaatattttcaaaaaccctagtgaagaagaaatatttactgattacatttcttttcccttagggataaagaaatggagaagagctttgaagtagtaagacacaaaaatagaggtagggatgaggtttcaaaaaaccaggcccttaaacttcagctagacaaccaatatgctgtgcttgaaaatcagaaaagcagccactcacaatacaattaaggaatgggctttgctaacccttctgaggtaactagactgcagctaaccaccaccaacagccattcatcatctgatctctgctggatctacagacaccgatgcagaccactcgatttcatgaccggccctattgcactatggaagttaaagtgtcacgactgctctatgcatattggatttaggggaattttcattgttacataaatgtgtgaactagtttcaacagtgttctttcatatttactctgcaaatacaaaaaaccaaaacctgcagccagtggtcatttcaaaatctttttatgttcagatactgagccttcataagggttgactacctcagatttgctgcactcattgtggacttcatgtggatcacaacttctggataagaagattacaactattaagtgtcgatgtgaaccttgcaaccagctctactggattcttatcagaaatcctgcataaaaagtcagccatctgggttctgatctgctgtaaaagatgaagatttaagtgaccttaattaacctgtcctgtgccctacccttaaggaatactctctgtagtaggctgttgttatattagacttcctggaacacactgctgaaaagaactgatgtgttcagatcatctgtgtagggctgtgatttgtaatttaaactaattgtattctgaggtaaccacaaaataaattcaaccaaactggggtccaccaagtgggggaaggggaagggagagaataatcttgggggttttttttttttggtaatttttttatttggatagtgcttttttgttttgtttttgttctgcattaaggccttttttgctttgacttgaaataagttctttgacagagcatattgcttggttaattaagtaacctaaagtatgcattaggattgtgaaatgtctcgtgagtatgccaatcctgagggtggaaccaaatagcctttgatgaaaagggcagtggattctggaggctctacttcaggtgctgctataatgcctcatctaatcaggactaaattgtgtaggaaactgcagtgggaagaatatgctttctgctcaggctaagagggtcactgatctgtccttagaaattcagagtaacatgagcaaaacctcagctaaaacccatttaagtggcatggattgtgcatgatctttgataagaattcctcatgtacttgtgcctagtttttcaaggtattggctgttctatagatgcagtgattgtcccagctagctctgttaccagccttttggtgtgtctttatgttcatttggagagtcagggcgaaagacaggtgatgtagcacttctgtttttaataattattgcttaaaatacctattaatagttttgggtcatttaaagggacttgaggaagctacccaggattacagaagagtgtccacctaacaagatggtctggcagtttcctagttttgtatctggttcaatagaaatatgtgaaagtggtaatgtcatcatttgatgcagagtccgggtttctctataataaatccctttgccaaatgcatgagttgcagacttgctactggcaagagtgaagcaagtgggtgagtaaaactattttgacgtgggagcgttttcagataggagtttagtcttgacgaaagtgtccgtgcaggaattggactccgaggagggttacagtatctcctgacgggacctgccactcgcatctgggcaatgttgacatttgaggtggcaggcaggatgcctgccttctaatatatttgggtgagtaactgagccagccaagggaaggttgaatgattaaatcagaaatgggattcttggtaaactgaagacttttatttgggaatgaaaaaccttaaaaaaatctcttcatcgttgaactgtgcattttccctgcattttttcccaacaaaattttgttgggggttatgttactgaagaatgaacagatgagtaagtggaggtgttatgtaaaggcatattgtactcgaaatctgaagacctgcagcagatttaaattacaactcttgttataactttttaaaagattgtgaaaatatcaaaatataaatgaatcaagttttaatatactgtatgatgggtggatgaggctgtccattgtaccatttgtttgaattctcaggcatggtttggcagtgcaagaattctgtaacattaacaaattcaataaaaagtaaatatatggattttggactgtaatggttattttaaagccttattctgtctttgaaaatggtgagttgaggtcacacctctcttgctgtgggaaggtgaagatgctctaaactcaggggtgtacttttttttttttttgagacagttgctctgtcgcccaggctggagtgcagtgatgtgatcttggctcactgcaacctccgcctccctggttcaagcgattctcctgcctcagcctcctgaatagctgggattacaggcgtgcaccaccacacccagctaacttttgtatttttagtagagacggggtttcaccatgttggccaggctggtcttgaactcctgacctcgtgttgcacctgcctcgacctcccaaagtgctgggattacaggcgtgagccaccgggcctggccaggagtgtactttctgtttcagaagtgtttacagagtactcaagcataaaaaagaccgatgaggatttaggcaaaccaaagacagtaaaaaaagaaatagaaaatttaaaaaatacaacacgcatgaaagtggctgcaaagctgtgacaaatatttttggaaaacttgaaatacacatttgtccttgttgctgtattaaattttgttaccttaaactatggcaaaggaatctaaaatctttatatagactaaggatttaaggctttgttcgattaatcttacaattctcaaaaacagtaattttaaatttcaggatttagtttggattatagtccctcgatttctaaattagcaaaagtatatttcagtcattttggtagtggagtttaaatatgtaatgttaacaatttactatttgattattctttgtgcttgattgagatcttttttttttttgacaaccttatttaagatagaacacacacacaaactcacactctatcagtcttccctgctttaatttcttctatagttttaactttttagataaaagtcactcttttcaaaaagaaaaaaagagacagggtcttgtgctggagtgcagtggcgcaatcatagtcccctgcagcctttaactcctgggatcaaggaatcctcccgcttcagcctgctgagtagctgggattaatgtgtgtgctaccaagcactattttgttttttaagagatggggtcttgctatgttgcccaggctgttctcaagcttcctggtctcaagcagtcctcctctgcgtcccaaagtgctggaatgttttacagccactttgggagccactacacctggccaaaagtcaccttttgaagtgtacaatttaagaatttcttatattctcaaagttatgcaaccatcaccactcttaaaattcttgaacattttcatcaccccaaaaagaaattctattgttattagtcatcattttcttctttcctcccaaattcctcagtcctaggcagccactattgtattgtctctagtttcttttttctgttttttttttttttttttttttgagacagtcttgctgtcacccaggctggagtgcagtggcacattgtcagctcaatgcaccctccgcctcccggattcaagtgattctcctgcctcagcctccccgagtagctgggattacaggcacccaccaccacgactggctaatttttgaatttttaatagagatggggtttcaccatattggccaggctggtctcaaactccagacctcaggtgatccacccgctttggcctcccaaagtgctgggattacagctgcatgagccaccgtgcccggcctagattttctcattctggtcatttcatataaacagggttatacaatttgtttttcagagactggcttctacacttgtttttgagcatgtttttgaggcttagcatgtatcagtgcttcgtttttattgctaaacaatataggtaattgtatgggtataccacgtttaaattgtacattcatctgttggacattggggttgtttcattattatgaatgatgttgctatgaactttcatgtacaagtttttgtatcaacatttccaattctcttgggtatatacttagagatgaaaggctgtatcactttgaggaactgccaaactcttctaaagtagcctcaccatattatatattactattcccaccagcagtgtcagaggattccagtttctccaatatccttgtgatcacttgtttcagattggttctagtcttccgagtgggtgtgaagtatctcattatggttttattttgcattcctataatgactagtgatgttgagcatctttaaatgtgcttactggccatctgtatgtctttggaaaaatgtgtattcaaatcctctgccaatttctaaattggtttacttataattttattgttgagttgcaagtgttttaaatttcaggtgctacttctttgtcagatacatgaattgtaaacattttctcctaccatttttccctttcttagaagtgtcttttggagtacaaaattttcaattttgatgaagtccaccttttctattctttagttgcttgt

SEQ ID NO: 312 - DNA, 93097 bp, Homo sapiens
atcacaaattcaatttaatcttttaggccacaaactgacaatattatgagtatatttatatgattatatgattagcatcacatggtattttaggcaaatacaacacttgaaatcactgcaatggcaacagaggtagctatgaaattattacagtagtacagtatgtactacagtaattatatgcagttatgatttaacattatacctttacatttgtttacatttctctcatgaacctaacgtatactgttgtaaggttcttgtactataggtaaagtggtatgatagtatatgaaggtaggctatgctaaatcaaagatgcatactataaaccctattgtaacccccaaaataacaccacaaagttatagctaacaagccaacagaggagataaaacagaatcataaaaaaatgctcaatccaatagaaggtagaaattgaggaagaaaggaacaaagaacagattagacaaatgggaaaaaaatagcaattgataaatttaattaaagccaatactatcaataatcacattaaatgtaaattttctaaccattctcattgaaggtgatattgtcagtttagacaaaaaagcaagacccaaatattaatatatactgcctgcaagaaacacgctttcagaaaaattatataaatagcttaaaaagggaaagattggaaaatatactatactaaaactataaaaagttaactgtagtgactatatttatatcaaaatgaaattttaaggaaataacattaccagagataagaagggtcattttataaggatataggggtcaattttaggtaggaagtgggactcaacttcagagggttcaacattggaccagattgaggactagctaaaacataacccgggtgaaagcagctttcaatcagacccacccaccagtgtgccatgtcaatttactgttgccatggcaacacccgggcgttaccacccctttccatggcacccaatgattcaaaagttactaccccttccctgcataaaccaccccttaatctgcatgcaattaggagtgggtataactatgactgcaaaactgccctgagctgctactctgcctttgggacaaccctgttctgcaggaccagtcatggagctctaacaacactggagctgtatcactgcctgttcaataaagctgttttcttctacctctggcttgcccttgaattctttcctgggcaaagccgagaaccctcacgggctaagctcctctttcgggctctcctgccctgcatcaaatttatcaagagagcataaaagttctacacctttatgcagctaataccaaagtttcaaagcacatgaagccaaaattgatagaacagcaaggagaaatagacaagtccacaatgataactggtgattttcaaatccctctctcagtaagtaatagaagtagaaaatcagtgagaacatataagacttaaacaatacaatcagccaacttgatctaatttatatttgtataacatttcacctaacagcaacagaatacacagtctattcaaatttacacagaatatttaccaagatgtaccatattcagggacataaagcaagcctgaataaatttaagggatataaatcgcaaactttggtgtctgatcacaatgaaataaaatcagaagtaataacaaactatttcttaaacatctccaaatatttgtaaaataaataacactgttctaaaaaaaaaaaccaccatagatagaagaataaatcaaaattaaaattataaaagattgtgaactgaattaaaatgaaaacacaacatattaaaactggtgggatgcagctaatacttggaatgtaatttagagcaataaatctgtatattagaaaagaaggaaattttaaatcaataaatcagcctccactataagaaagtagaaaaataagaacaaattagacccagagtaaacagaataaaggaaataataaaaacaagaacagaaatcaataaaagagaaaataatagagaaaatcaataaaaccaaaagtttattctttgagataatcagtaaaatcaataaacttctagacagaatgttgagagaaaaaaagaaaaaatacacaaattaccagtatctggaagaagagaagtgatatcactacaggttctatacatattaaaaggataataatatttgaacagtaatatttgaacagctatatatcaataaattatacatcttaaatagagaaatcccttgatagacacaaactgccaagactaccttaagaaaatactagataacctaaagatctaatatctattgaagaaatttaacatatttaaaaaaccttcccacaaagaaaagaacgaaatggcttccttggttaatcctaccaaatttttaaaaacagtaatgccaattctacacactgttccagaaaactgatgaaaccataacactttcccaaaaggatttgtgagcagaatatattaaagaattctcagctgggcacagtgagtggctcatgcctgtaatcccagccctttgggaggctgaggtgggcgaatggctggagcccaggagtttgagaccagcctgggcaacatagcgagatgtcgtctctacaaaaaatataaaaattacctgggtgtggtggcatgcatctctagtcccagctagttgggaggttgaggttgggggatcacttgagcctgggaggcaaaggctgcagtgagcccagattgcaccactgtgctccagcctgggcgacaaagagagaccctgtctcaaaaaaaaaaaaaaaaagaattttcaaaaccaaacaataagaaaacaaataactgaaactgaattggcaaagtttttaaactgtaactacaatcaaataagatatatagatggctaataaatacatgaaaagatgcttaataccattactcattgggaaaatgtaatttaaaatcacaatgagataccactatacatctattagaatgactacaattttaaaaactgatcatatgacatgattgtatatgtagaaaatccaaaaggaatctatagataacctactacaataaataagtgaatttaacatgatactggataagatcaataagatcaatccatgataaggcctctacataaaattataaaacatcactgaggcaaattaaagatacaaataagtggaagcaaatactgtgttcatgggttgagacactcaatgtcataaagatgtcaactttccccagtctgatctatagagtccatgaaatttcaatcaaaaccctttcagaggagtttgtagtatgtgtgtgtgtgtgtgtctgtgtgtgtgtgtgtctttggaaattgagactctgcttcacaaacgtatttggaaaatataaaaaagaaacaagacaatttttgaagattaatttacactacttacaacatagctatagtaatttagagagtgtggtgttggcccaatgaaagtgaaacagacttaacggaaaagaagtctggaaacagaccacttatagtcacttggtttatgaaaaaggtacaactgcagtaccttttgcagaaaaggatgataaatgttgctgcatcaagtagatatccttatggtaaaaagtggatcaatttcaggtgttctgtaacctgaatatgaaaggtaatacaatgtaacttctattaaatgaagtaaaatatttgcatgatcttggagtgggcaaaagttttttaaacaggacacaaaaagtcctaacaataaaggaaacaatacatttgactacatttaaaaaagaatctgttcatcaaaagatatcattaagaaagtaaaaaggcaatccagattttaaaaagattcttgtcatacatattattaaaaataccagaaaacataatgtactctgcatggcaataagaaaagaccagaaaacccaatagaaaaatgtgaaaatacttgaacaaacacttccttatgagaatatctaaatggataataaacataagattaggtgctcaacactactagttgtcagagatatgcagattaagactactgtgagatatcactacaaatctaccaaaatatctaaaattaaaagactgataaaatagcaagtgttggcaaggatatgaaacactggaactcttacatacaactaatgctttatatgaccactttggaaagctggaaatacctactaaatctgaaaacatacatgcttcagcaaccccacacttaggtgtacccagaagaaacatgtacatatgctcaccaaaaacatgtacaagattttcataacagcaaaatttgtaataaccaaacactggaaacaacctaaatatttttctacagtagaatggacaaataaaccgtgatgtattcatacaataaaacactatgcagcagtgaaaatgaatttactttggctacatgcaatactatggctgaatcttacaaacccaatactgaacgaaagagattcaaaagagcacatattgtttgactcaactcatctaaaattcaaatatgggcaaaaccaatctatgctgatgtatctgaagagttatttcctttgtggaaaatgcagtgtaatgactgggaggggtatgatggagacttctggggtattggtaacattctttttcttgacctgagcggtggttaccaggatatgttcgttcattctattgaaattcattaagctgcgcacttgtgatttgttgacttttatgcctgtatgttatgtttaaatataagtgtgtattaaaatgtgtgtgtggaaagatgaagtagggatacttttccctattcctcctattaaatataactgagtactccggatattgtgaataaaacaaacataagaaaactctgaaaggtgcagaaaagaaggcagaaccagttagagaccctgggacccaaggaatgaaacagtgatgagctttttggtttttctttttacttcatatatatctgggtcttggagctgaagatggtggcaacccagacacatcaacaagcacaggcccaaatcaagccccaataaaagcttgatctctctagtcaaaggaccaggaagggtttgttttactccagccaaacactacagaaaaaactgtgctgttcccaccccacacctacctagccagcaaagtctaagtgatgaatatagacttctagcattgccaggctatatcaaggtgccccaactctttggctgggatgggggtatcacagaaggtcaagatgggagccaggacttttgcctccagtgggcagtaccaaggcctcccacctgcaatgtcagcgtagaccacatggggaggctggacttctaccaccaccccacagtaatgaggaccaacaaatttttgacaaaggtgcaagagcaattcaatagagaaaatataatcttttcaacaaatgctgctgtagcaactggacatccatgggcaaaaaaccaaaaccaaacaacaaaaaaacccctccagcctaagtcttacacctcacacaaatgtaactcaaaatggaccatgaacataaatggaagacataaaactatttttaaaattttttcaaaaaacatgggaaagtatctttgggacttagggcttagtaaagagttcttagacatggcaccaaaaggcacaattcataaaagaaaatatcagtaaattagacttcatcaaactcaaaaacttttgctttgaaagagaccttgttaaattgctcggagtggtggctcatgcctgtaatcccagcacttagggaggctgaggtggtagggttgcttgaggccaggagttcaagaccagcttgggtaacatagcaagaccttgtctttataaaaacaaaatttaaaaattagctgggtgtgctggcgcacctctgtggtcatagctacttaagaggctgaggcagaaggatcacttgagcccaggagtttgaggttgcagtgggccatgattgtgccactgcactccagcagagtgggaaaaaatatttgtaaatcacatatctgacaaagaactagtatctagaatacataaagaactctcaaaacttaacagtaaagaaaagaatctaatttaaaaatggacaaaagacatgaacagacatttcattaagaggatatacagatggcaattaatcacatgaaaatatgttgaacatcattagtcattggaaatgtagattaaaaccacccacaatgagatattactacattcctctcataatggcttaaaatattgacaacagcaaatgctgatgagggtgagaagaggctggatcgctcatccattgctggtggggagtggaaagtggtagaaccactctggaaaagtctggcagttcctttaaaaaacaaacatgcatatgacccagcaagtgcactcctgggcatttatcctggagaaataaaaacttcctttcacacaaaaatctctacatgatagttcataacagctttatttgtaatggccccaaactggaaataatttcagatgcctttccacaggtgagtggttaaacaaactgtacgtccatactattgaatgctactcagcagtaaaagggagctaactattgctacaaacaataacctgggtgaatctccatagaattatgtgaaaaaaaaaataggacatgcagtggaatagtaaccagcagggaaaatgaaagaactgctgctacatgaatcaacagatggatctcaggaacataatgttaagaaaaatgcaagtcataggacagaatatacagtttgagacattatataaaattcaaaagatgcaaaacaaaaaagtattgttggaggacacatccaaatgtgataaaaactcaaagaaaagccacagttctggattttcaagctggggagagagggaggggcagaaacacctgagggcctcaaaagtactgtaatatttgagtgctccagccaggtgaagtgaaaaaaacaatcccaaagggtgatatactgtgtaatgccacttatataagattcttgaaataacacatttattgaaatgaagaacagattagtggttgccagaggttaggaaggggttgagggtgggaggaaagtgggtgtggctataaaaggggaacatgagggctctttgtgtgtcaaggtacagaacagaaatgtaccttgactgtcttaattccagtatccacattatgatactgtagtataaagttctgcaagatcttactcttggtgaaaactagataaaggatatacagatctgtcttttttttttttcctgtttgtgaatctacaatgatctcaaaaatttaatttaaatatatatatatatatatataacacagcaaagggctcaggaaaaccaagatcttgaagaaaatgaaaaatatagatgatgctgtagtgctatatgatctaacgaatatctttgaaaaatagtttggcacaaaattaaacgtacacttgtttttataccacaatttacctactgacacatatcttagaaaaacttcacagaggcatcaagagacatgtaaagaatgttgatggcagcattgtttgttaatagcagaaacaaaactgagtgcattttccaatgttaatttcctggttttactaagcaatgtggttatgtaagatgttatcactggggtagcttggtgcaggatacatagtaactccctgcactgttttttataacctctatgtgagtataaaattatttaaaataattttaaaaaaggccaggcgtggtggctcacacctgtaatcccagcactttgggaggctgatgcaggcggatcacgaggttaagagattgagaccattctggtcaacatggtgaaacctcggctctactaaaaataaaaaaattagctagacctggtggtgcgtggctgtagtaccagctactcgggaggctgaggcaggtgaattgcttgaacctgggaggcggaggttacagtgagccgagatggcgccgctacactccagcctggtgacagaccaagactccatctcaaaaataataacaacaataataaaataaaataaaataaaaattttaaatgacacattttacagaaaatcatttaaaaattggggcataactagaatactaaccagcagtgaaaatgaaagaactgctgctacatgaattaacaaatggatctcagaaacatgatgttaagaaacatgcaagtcaggacagaaaacacagtttgataccttatataagattcaaaagatgcaaaacaaaacaaagtattgtgaaggacacatccaatgtgataaaactcaaagaaaagctaagattctggatttccaagttggggagggaggaaggagaagaaagcacctgggggcctgaaaagtactataatatttgagccctccagctgtgtagagggtaaatgggcactcagagtgataggttttctttgtaacttacatatacacagcacatactaaataggaagatttaaagaatttttttaaatggaatgcacagattctatgatatggaagaaactctttctagtgaggttgccaggctgaggttcagtggccccattttccacctggagaaagtctgtctgctttagggcaggttaaggacaagactcaaaatcaggggagataagcaatgatagttggaggagagagacttggagcagagcaaacttggagtctctaaggctctcatttccacagcatgatgactgcattctgagagcaatgccagtatctgctccagcgacgtgagcccggtagtcggagccgggtttttgtcatttgaactggaagaattatgacagagtcccccaaagtaagctggaccatagtcagcccagctggacctggtaagcatatgggatgacttggaggcttagaggtgcccagaggggccctgccccagccctccctcccctactgccataccaccttacatgtgcgggaccagatgatcagaggaggtacaggacctgcctaggcttacccaaaagatggtgccttttctggcacacctcagctgttttgtcttgccaccgatgatctcatcaggtcaggatgagagggtacagggagacagcactagatgttaggagaaggtgcaggttggaggagtgttgcatggctgggtaccttggccagtagctcactggcccttctttggagggatcacttatagagacgggaagggctgtgacttgggagtctcctctcctttcagagctttcttcaaccccaagctggatatggtctcctaagagagcaggagccccagagaagtgggtgggtgtctggagggttaccctgagcctggtgccagccacaacggggcagatattctaggtgatgacttacaatccctggggttccaaactaaaggtaattatgagaataggacagttattttgatttgagttctagatgttcattcaaacattcaacaactatttcttaaactctgagctatgtccttgggatgcagtggtggagcttcaactactgcttttatggaacttgtggtcaggtttctaacaagaaataggaaagagattcgaggtgagcacaccagggagacagataggcttgcccaagcaagccccataagtcaaaaagggggtaacaagtgtccacgagaaatctggaggtgaaggttgtgtctcactcctctttctctttctataacacatgcgtgcacacaccatcgtgttcaccgacatgcagattattatctcaaataaatgctcactgaacagccataaatgaacaagaccacgctgtggcagaacagtaagggacagctttgtaaaacctcaattaaccagcatgccttaggctcgggctgtcttgggagtgtttctagcacttggcgtctgctctttgctctcactcactcacaacttggtctgtgtgcctcgatggaccaggcaagtagaggccaaggagaggtcgcccacatgtcctcagatagctcattgtccagatacacctaattgccagggtggggagtggcattgtcagcctggcgaccccgggatcaagaaacgcagggcactgtcctggagatagtggcactggcattcagagcgtcaccgttccttctctcccatggggcaggttaggatttggcataaaatgatccaaatgagcagctggtttgaggtaggcgcgcctgatattggcagctcctctctcgctggccaggtctgcgggggcacccacagactccacaagaggccgcccaaataaagggtctaggcctcgagagggaagggcgggctagaagccacggggggcaagagtcgagccccatctgcgccaagtacgccaggtttccctaggtctgaccgccctgacgggcctcgccacaccctggctctcccccaccttcgttcctttccgccctgtcggtcggacgactgcgctgtgcatcggtgtctcgcgaggtggaggaagggactggcatctaggtttaaaagaccagaaacaaatgtcccctgacaatttctgtcattttctggattcaaaagaggggtagagtggggaagacagacgcagcggggcagcgagacacggtcccccccggggggctctcaggggtacggcgaggaggttctctcctgcccgggtgcgggctcgggtgggcgggcgcacgccccccagccccgcagccccgcgggccccgcatgacatcagaggctggggagcgcacagagcgcaggcgccggcggaggaggcaggcgggagggggccgactggcgcggctctggagagcgctcctccgccccgcgcgccgtccctgcgccccgctccgcccgcgcctctctcccagcgccgcgcctcgggcgtaaagagcgcgcccctcgcaccgcagccagtgccgaccgcagcagcccagccccagccttcctccgcctccgcctctctctcctcctcctcctccgccgccggacacgcagccgcaggccgggaccgggacgcagctggggagtcagggacgcgcgcagccagcccttccccctccggctcccgcaccgccggccgcctcccctcgccctcctactctcccctccctgctccttcgctttttcctcctcctcctctcccggccccggctgccagcaccatgtccgcagggggagattttgggaatccactgagaaaattcaagttggtgttcttgggggagcagagcggtaagtacccggcttaatctcttggcttgtcgccgagtcgacccccgccgcccaatcgcccaccccattgggacccccggcccaggctcggaaaggcccctccttgccagggtagaggagagggacagggatggggaggtcggggcggggtcgggctggggaggggccaagggtgaggacggaggaggcgctggagcctggggtggaggtgagggtgggctctgggtggggggcccggggtgtgggtgcaggtgcggcgctgcagggggcccggagggcggcggctggctccgcggcgctggccagggcgtgaaggaaccgggctcgctggctagctcacactgcggcaccggctgcgggcgaccgcgcaggtggctgggtgctggcgggggtggggagagcgacgggcgccccccttggagaacgaagcgaagctggggtctggccgggcctcactccgctgcactggaggggtgttccctgcggaccctgctgggaaccatgcgaaagggcacgtccagggcgtgggacaaacagccaccggggagaaaagagcgacacctgtctctgctcgaaagagcgagtgcaggccatgggggaacggggagcctacctcccctggctcacgtccgactgggcacagaaggttctagacccgctgcccttcgccggcgcttgttagtctccttgctgcccagggatctgggcaattgcagtgagggctaccccaactcgaggcgatttggggaatgatacaggggcacctcacaccgagaggctgtgaagtctggctctgggcagagaaaggcccaggcgacacgccctgcctagcttcccagcactcctccagagagcatcggtggattcttcccacccccacctcccagctcaccgcccttcttgggggaggggaggtcaccctggcagtcggccagagctgggggagggggagactgcttctccgctgcccggctccctccccaggaaaacatctctgaaaaccaggttagtccctagaggcgggaagcccagattgaagggcagggacccctctgccacctgtaggaaggagtggctttcagagcatccctccagaggcctctcgcatggggctgcagggagacaaactgagctctggtcagctctgctctgggagaaggctgtccttgcgggacaggaccccagctctgcctctgcagaccagtcctgttcacctgggttggtgcctctctgacaagggggcccaaaagaaaggcagctgtgggaggactgggtgggcccaggaacagtgctactgtgctgtgtgtacatgagggttatggaggtcacgtggctggctcttgtctgctgatactcattgcctaagatggatggttcagagaaggacgttagaaggtagtgtccaggcccagtatggagatgggtttgggggacaggctgggcatttcagaagaagatccactcagccagccagcgtttgccctggattctgattgcctgtttttaatagatcccagtttcatagagctgaccataccctgtgtctggaagggattttggtggtattcacatcccagtgctagtctcacccggcctggagccctgggagataacctgcagggatcaggcagcctgggggttgaattcttagctgtgttgtctttagtaaaatttgaggcctctctgtgactcactttctgtctctgaaaaatggttgcttgaagacaattctcttacttcttcatgtttctttagtgcctctcaaagtgcctggcccctggtaggttctcagcaaacatttgttctaagtctgcacaagcttcagaaaggactaggagtttggtgaagaaagtgtctctggtgagtttgagggaacatctgggctccttcagaatccctgatgaacggaggcccctgctgggctccacagaccccctttgctcccaaaatcacagaaatgagagctgaagcctaagaaatgaacccaccacctctcccatatgttcaaatgggaagtctgagccccagggaacagggaggccttgcctggagtcccagagtcccattgtgagttgctaatgcttctgggctggagccccacctctcatttccagtccaatatttttcactagcgtgtcattgtgaagtaagatgaccttgaattggggaagccaacaactggggagcctccccaagagggagtaagggttgcttctgtccagccaggcttatagttggggcttgtgactggtaggaatgctgagtagttggtaaggagcagggttgtgagcccttggaacatggtcattagagagtcactgctatcagtgagatgggctgctggccaccctggtgccttctgtcagggagtcccaaggccctgaaaagcctgtttccaatttgttgcattgttagtgggttcttttaggttttacacagcttttgagttaggtaggggacatgtatgtgcatctctaagccttatgggatggggagtcacctccacagccgcttcttctaccttgcctgcacagttttgcatctgttggtcatttgtgccagcattctctgcagcctgtgcagtggagagagccacctgagggctggccctcacgctggccctggctcgctctttttatatgacctcagaggtcccttatcttctgtgcatgggggacttgggccagctgagctcagcggagtctttcagagcagcatgggcttgccgatatgagccgagtgccctggagatgggccaggggaaggagctggagggatgtggctttatcttatttcctgtgcctagcataatggtggcatttctctagcctggtgggcaagggcaatggattcccaagaagagtggcgtgcatggaccagggtgtggagcacaccctgggccagataatcgcaggtggacatcaggtctttgaagataccagggaactggtttgaatgggaggcccttgagaagccactctggaggaaatacctcaagccagtgaaagagcccccctcctggcagctgtccccctggcctgtggaatataggctggctgacagtgtcagcttggcacaggctgggattgtggggagggtgctgtggacccaggatgagagatttccttgtggcagggaggctgtggagtccccctggtgccagatggctctctgggcctattgggtatgcccctgtgctgatggcagtggtaggagacatgggagggtgacatatgtcagtcccgactggggcatttgatggcgtccgagaagacaagcaggagcaggtgtttgaggaggggagagtgggcctgtgggacccacgtcttcctcctaagctctaatggcattctgtcggcttttaggcctcacttggcacatctcagtgtgtgtggtgggaagggtcagggatgcgtctgctgtgcactgtcttcttctgacctccccttccccaagactcttccagcaaaagcaggaagactggatggagacgcaaaagctctgtctgctttcctagctgaggacggcaggccagtttctcgctctgaccagccacctgcctgccctgcccctggtattgtgctgctggaggtgctgtccatgttgagcatactgtgaatagcattccttggagctgtgcaatgaagcgactatgcaggcagctgcctttttgttgctcagttgtttagtcatttgttcatgtatccttccgtcccactccttctctctcctgtcctccctccattatctgtttatttatttattctttgagcgtattcctgccctcctggaacttatagtccactgggagcacagacatttgtggatataattacagtaaaggtctatgagagccatgatgagagaagaacagctgctactggggcctagagcaggggcgcctgacccgcctctgggggctggtgtcagaggcagcttccgtaggctagcaagggatgcttctataggcagtaggctactgctacttcatctttgggctgtgtgtagaaagtaggtcttggaacaagcccaccctacccagagggccttgcctgttcttctgctctgccctgtagaaagtgtatgaggtggaggttcagaggacaagggtgactctcaggtatctggcttggtggtactgagttggggctgtccctgtactttcagcccattcctctgtggttaagggttaatgatcattcagtggcccccactgcctggaaggctcactcctctgcccgcagcctgacccatcctgacccctgccctcccactagccacaccatggaacacctgccctcctgcagggagcccttcatcagcctggtagatgtgccagcagcccctcctagcaagtttcctcctcccaccaatttccagacttacctgctcttaggtgctcacttccactcctgctcccctgggctaccagcccacctggccacacaccatggcatagctttggttttctctgaacatttcttaaatacaatacaatcatatgcttccccatgacctgtcttctgttgtctctgttagctaaggattttaaaatgttaactttttcaggtacaaaaaccgtaattgaattttaagcatcttctgaggtctatgtcttagtcatcatttcacccctccccacctgcaggtagtttgtgcttattaagtatcttgatttgaaaatgatgagattatccttgctgtgtgagatttgctgatggcccatcagtagattaaaagtgaaggaagttgaggtggcttgaaataggattcctatttcaaattcctgacacctgctgcttttttaagccagattttttaccagcaatatcttaagaatcttggcttactgcaacctccgcctcccgggttcaagcaattcttgtgcctcagcctcccgagtagctgggactacaggcccacaccaatacgcccggctaatttttgtatttttagtagagatggggtttcactatgttggccaggctggtctcgaacttctgacctcaagtgatctgcccacctcagcctcccagagtgctgggattatgggtgtgagccatggtgcccagctggatcatgtaaccttggtcatgcgcaactcacaattcatctcaaaaaacctgaagttcttggggggcacttcctcattcctagtctctgaagaaatacatgagaacaaccaggccaccagaggtggaaagggacacaccagacctcagcttgccagagctcactttgacatctggaagaaatcaccctgttgccctgagccttagcttccttctcttgatttctctcctcccaatttttctcctttcctcagtggctggcataagaaggggcacctttgtggaggttgggtacaggcccagaacctttgcttttttatttgtttaaacagatgtgtgtgagtgagagagtcagacagacaccaggatgagaattaacctgtacttggtataagaggaaggtggcacctttaatctgatgatgcatagcaagagaacttgccagcaaagaaaaaagaaacttagaatatgttctggctgcgtagatgtaataataattactgtcttttgcatgatctgatgatcattatcatttgcagcccccagattataatgaatcacattaaattataacaaaataaggctgggcgtggtggcttacgcctgtaatcccagcactttgggagaccaaggtggcaaggtgggtagatcacttgaggtcaggagttcgagaccagcctggccaacgtggcaaaatcctgtctctactaagaagtacaaacattagccaggcatggtggcgcatgcctataatcccagctacttgggaacctgaggcaggagaatcgcttgaacccgggaggcggaggtttcagtgagccgagatggcaccactgcactccaccctgggcaacagagcaaaactccatcccaaaataaatatatatatatatatatatatatatatatatatatatatatatatatatatatataacaaaataaccttattgtccttttgttccttattctatccctaaaatcagtctatgactatctttatagatgttgccccgacattgcaaactttgcagactggccggggccaggcccaagggtggtaacatttgtatcccatccaggctgcagatttcccctgtcctccccacccaagtcgtccattgttgccgaatgcatcggccattgaatgtgtagggctgtctggtttcagtgtggttaactttgggaaattattggacagaaccactggggaaggtgacagaaggctaggtagaacagcagaattcataaacattcagggtggactaccgggaaagctgatgggcattttctctgcgtctgccattcttttccatttctcaccacagggaagagaagccgagggagctctggtggaggttgccagggagaagtaccagacacgccctgaaatggacagcttttgttagggtggaaagacaggctgccaggaaatggggctccaagcagggcctggggactggaagcccctgggaacttggaatgccagtccagtctttgtttcctagaacaagggaaggaaaagatgaagactcacaactcttaaggactcctaggatgttctttaccatatcttggggcttgagatttcaaaattgttttcattattttcataacttttgccctaaacaaagtaagatctttttaaaaaatattgactgatatacataatttagcattttaataaagtgatttattttttgtagaaaaacttatttattctgatctcttggtaacaaggccagagggagcccaggtgaccagatcacatgctctgggccagccatcacctgtcccaaggggctgacatacctaagggacaggcccaagtcctgaggaggcagatgttacctcacccctgagggcagaatagagctttcaaagcaaaggttacttccaggaaatgcataaaaagaatggcagcctgtgtccttcctcacatgagttcactcacgtggcatttattgaacatccactatgccggaggctccacacagggcactttttatcttcccagccaccctgtgacggatgtgggatcatccctgttttgtgggtcaggaggcagaggctcagagagagctggccctgcccaaggactcactgtgagtgtggcagaattagaattcagacccaggtcactgtgagaaacacagtggactatcagacctcttgcctcaaaggcagcttctggcctaggactggagcggaggagacagaagaacactgaggtcttctggacacgaggtctgctgtgcatgactcgtggggagtgtttgtgccaagctctttgctaaagaggaacctgcggggccctgagcagggaggagggaagcagggtctccgtgtgggagctgctggagctggtcttgcacagcaggcaccctgttcttccatttgtggtgctttgaagggagttgatagagcctatgggggcagctaaatccctcccaagtcagccctcagcccactgccatggttctagctgagaactaattactaaccagggaagaaccaattaaactaaatggctggttcccacctactctggggtaaccctttcctggccacatcctcccttctggcttggagataccagggccctgaagaccctgattctattcccggtctgtcactggctggctgtatgttggataagccccagcccatctctggctttctccgtgtatcccctcaaggctactgggctgggtgaccccttgggccagtggagctctaactctggttctgcaattcagtgccagctctgagtatgaggccaagccaataacactcccagcctggagacaagcatgctgctggtgagaggggctgcaggagtgagatgggggatcaggggctctgcgactgttgcccccagaactgtcctgggtcccacatgcaggatcttctccagcctaccacctcctctcctgggaggcattcctggccccctacacctgagtgcaaccctccctgggggcacaatgtgggggaggggcatgctggctcccttcttctgaagatgtgcttggctctggttgccaagcaacaaggatggggctatcctgcacttctgcttccaggaggtgtgtcttccacacagagaggaaccatgattaggacgacagggcaggtgacacctcccaggtgctcctagcccaggggcacccctttccacagcctggtgggaggggtaagctgggagggcagggaaaggacagagccaagaggggtatatggtgtccccagcagacctaggagggcttagagacccggccccagccccagctcccacccccaccccatcaccatattggtcctcctgcatcctgggcttccacctcagcccacccctctgctgaatggatggtgttggtgtgcaatggcaccacctgtgctcattttcctcacctgtgcaggaagttgatcattaccttgttggggttccaggaagatcaagtacatctatacatggcatgtgattaaggctcacatgataaaagctcaggtgataggtaattttgttaatgaaatagtaacagcaatctccatctcctccctcattgcagaagtagggtgcgagattttgagaatcattgatcatttctgtattgtgaactgtggggtctacatcctcgtgatctggcaggaagagctgctcatcccattttataaagaaagcgaaggtctgccaggtgaaggcttttacacagatggaaggaccctttgactccctggccagtgttttccccagctccccatccctgctcagagacaggctggcaaaaagtgggacagactcaccatgcctgctcctctggggccaccaaacctgctcaggggaagagtacctcatcttcacagctccgttacttcctgtaaggagctcagccagggtggagtataagggcagaggctttgcagcattggggttatatgccttcagatgtgtgaggtcggtagtacttggcccacaataagcaggcaacaaatctcagccagtattaagattagtattacatacacaagcaaggctatgggcgtgatgtgcttggaggagtcagggaaggctttctggaggaggttttgcatagtgagcaggaactcaccagcaaagaaggggaggcactgagggcagagggcctgaccatgcccaggcagtgaaaggcttggggtttctggggaatcgggtgtggttcagggtggtgggattctggtgcgggtggagaaatagtgggggagaaggggttgagcctgggggagtcagtagggtcaggccctggaggacctccctgcaggcagtggggatccactggggagttttgacccagagggacatgctcatggattagaaggtgaaggcagaatgtgttctgattggaggcaggagatccaggtggctgaactaggtcagaacagaaacgttccgaggatggaatttatagagagggcttgtaaacttaagcttccttccagttctgaagctcagctccactgcagatgtatattttcttgattctttctcttagaatgaggcctcaggaacaatgaaggattgtaggggagggactattgtctctctctgcaaggccacactgtacgcagatggaccaaagctagcccctttaagctcccctgtccatcctatctccacagtgccctgggttccctgactgctctggccttccatgggtgttctgcgggactgctggcagcccttccggactcctccctctctgctacctgctcaggttggatgtggcatatgaccagaaactggccattgggtgtgtgagctcccctatcctctggtcattggatgtgtgagtcccccatcctctggtcattgggtgtgtaagtcctctgtcctctggtcactgggtatgtgagttcccgtcctctgatcattagtgtgtgagcagcccatcctctggccattggatgtgtgagtcccccgtcctctggtcattgggtgtgtgagtcccccgtcctctggtcattaggtgtgtgagtcccctatactctggtcattgggtatgtgagccctccctcctctggtcattgggtgtgtgagttcccgtcctctaatcattagtgtgcgagcagcccatcctctggctgttggatgtgtgagccccttgtcctctgatcattggtgtgtgagcagcccatcctctagccattggatgtgtgagttccccatcctctggtcattgggtgtgtgagtcccccatcctctggtcatttggtgtgtgagttccccattctctgatcattggtgtgtgagccccccatcctctggttattgggatatatgagccccgccgtcctctggttatttggtgtgtgagtcccccgtcctctcatcattggtgtgtgagccccccatcctctggttattgggatatataagcccccccgtcctctgattatttggtgtgtgaatcccccgtcctttgatcattggtgtgtgagccccccatcctctgatcattggtgtgtgagcccctcatcctctggttactgggatatgtggggccccctgtcctttgggcactgggtatgtgagtcctccattctctgtcattaggtgtgtttgtgtcctgtcctctgggcactgggtgtgtgagcacccccgtcctctggtcattagttatatgaggccccctagccctgttatgcagcttcctgtccctccctgtctcactggacttctcttccagtggacacttgatcacttcctttgctttcttggatattttcccctatgcctgtctgctgggttccatcaccccagcaagctccggagtccccaaggacttgagagagagcagcattgtagaagggagtgcccctttccatgccttggagaacagagacccatcttaagctggctgcacaaaaagctaaggctgaaagccaaggggccagagtagaggcagacactgccgttttgaaccctcccctaacccagagaaggcagcctgttcaggtcaattggtgcacccccctgctcacgggtcagctcatgatctgctttaagttttgaaaccccaccctctaaaggcctgatgacttttgctccctgcccttcctgttcttctgcataggcagtgcccactggacgttactgagcaccaccttggtattcctttgccagtgtagctggtgcatggagtaatcctaattttgcagcatcaatgattacagcatttttcagtcaccacccttggcctctttgagcagtgccaggttgtgagttcagggtgggtaaggagagctgccccctcatcttggtgctcagcagaggtggctcttctgcctgaagcagctggcccagagaaaaactggtttggaaggctgggccacaaacaacacagcccagctttgacctcttccagcctcctctggtccctctgtttcccccaaccctggggcaggcaggaggaggaccattttggctcaggattggagagctgcaactttggcctgtgcaccagggacaagtccctagagataaggaaaacctttctctctgggagtggctgtgctaattctgagaaaggaagagaaaatgttcttttctgaccctgtctgtgagtggggggaataaacactgcatagactaaacagtaagtgaggcacttagaacacatttcttgtttctttcccctgttcagtaaaagaggagggctaagagggcaaacaggggaagcaaggggcactggggaagagagatccatagaagtgctgagaccgaagggagaggctcacagacactgcttcctaccagacacagatgggggcttgttggccatgcacagggcccttgggagccagggtgggtcaaggtccgggcagggtgctgtccatcccagggtcctaaccaaatttaatgaaaggctggaggttcccatggagccactgatgagtatgggggcacaggacgatggaccagttctgtgtttgtgtggaggacaagatgaggagctccagcccagcaaagcaggggaaatgagaagagagaaaggctgttaccttgccttggaggttgagggagggtgttttccagcacactgcctctgtgctgccagcactggctttgaggagcagactgagctttgtctcttcctccccaaggctgtctggctctgcctcactgtgaccctgcagttcccagactgtctctgggctgctgtgagtagagtcaggtcttggcactagtgatctttgtttggttctgcacttctgtgaacagagcaaacctccaaagggtttcttttgggggagaaaccactcccaaattattttaaggatattagcaaatcctacttgtggcaccaagatctggaaattatcccctgattctgattcattaaattcccctccctcccctacattcaacccaaacactgcaggctgctgcccagattagaagtgaactggagacctgaagaggtacctagctagccacctgaccctgactctcacccatcttcatcagaagaggatagcaccccagatgttgggccagaagaactcagctcctctcctgcctctatcatgtagcaagaagaccacactcagctggagttgtggcctgggcagctgtgtctgctggtccttccacctctgcctgggggagggctgggtgtgatgtgggagaactggatagagcagcatgcagatgcccagtgaagcacacaggcaggactcagcctctgcccaggccagctaggagcgctttagtctcaaggcagagacctgtgaggttttgttccaggtgatcagcccggttcaccacagtgggagaaaaggcagaggtggagtaaagagtaaaggctgcatctcttaggaacctgactgtgagatggtgtggtagacacaacctaaggtgaccccaggtgagtcatacccttgcatagcctcctccccagagtgcagatggaacttgtgacttgcttgtagcaaatatagtgtggcaaaggtgataggtggcattccttcaatcaggttatgttgtacggcaaaggttcaaaggtgatgggatagtccctcccatgattatgtttctttatgagactcctcttgctggccttgaagaagtaagctgctgtgctgagagagggcctgtgagggggtcacgtggcaagggatgtgggtggccttcaggaaataagagcagcccgtggggggaagtcctacaaccacaaggaaccaaattctgtcaacaagcacacaagcttggaaaatgactccctgatccagaaagaaatgtagcccagctgacaccttgattacatccttgtgacatgctgagcagaggatccagtgaagtcatgtccagactcctgacccatggaaatatgacataataaatgtattaatatattgttttaagccactgaattcctggtatttgtaaaagcaacagataactaatacagatagggtgaagattttagaggaaggtgacacctgagatggcctcattttacacagaagacattggagtgtccaggaggagctgagacctgtcaggttaagtagccagcctggtccaacctgtgaagcactcattggggtcaggccctggttcttgatctgctattgttctttcttcctgttctgtctttgtgttctgagtaaaccctccttctttctaggcctcagatttttcctctgtggcatgcagggctagaccacatattctctaggcccttcttgccatgacgtgattttctgaggtcactctgatcatctgtgatccttctagaagctgggcctccaggcattagtgtggttcactctctgctgctccttggcacttcccatgttgtgtgtttccatttgggcctcatgacacagggacacattggtaagccttctgggctcagattagtggcaaaagcaggagtaagaagagcagtctctgaggtcaagcccttggctgtgcaccgaaagagatagtgtctggccatgaccctggtgctgtgtgatcctgggcaagtggtccctcttctgtggcccctcttcacatctcctctgataagatcagctccagtctcctctgtggctcatctatagtgctgcttttgagaagggctaaccttagggacccagagctcgcagcatggggacaggtgagcctggccaccatctccttgccctggtgcccaagcatccaagtccagtgggggatatgtggacattgacgcagctccccttgatccaccccccagcctggccctttgttgaccctaatgcctgaccagcagtctcagtccataagggctagagacacagtgggcctcctggcctgcttggtggtcctgtgcctactcccgggtccagggtccttgggatctaagtgcattttccaccccagagtcagtggtcttcatctcttaaatttcactggaaaggccatcactactcttgaatcaatcctgagcaggtgacattgagtccttctgggggcaggaggagagttctttctgttgactgaatgagaggtctagaagttcactctgccccttgtgctcccctcaccacctggctctgcaggggcaggggcagggcctgtgccctcctccttggcaaagtagaaaagttgagcagcagcgagcaggctgtgtgagggtgtatggaaggacaggaagagaagctggggctgcagaagtgcagggacagcttcctgtgttgatggagaccgcagggcttcctgggttagcaggtcagcactatggctgccaaggccaagggttcctctgagaagggggcaggcatccgggatgatgccttgcctgcatcagcctgcagtctagaggcctccttccacttgcctgagcaagctttgtctcatggcgaggccacagctgtgtcatcactgttgggtgttacgggcccattggccttgtcacagaccttctgactgggtctcagctgacaacctgggaaacacaagtttcgctctcaatactctgtttactcattctccctgcctcagccttcttttcctattactgagtcttttaacatcaacactactagcagttaagccttgggtatataagccttgggtattaaagcatatacattactttgccaaactccatgctggttggatgggccaagacttctgtcagttaaataagctaccaagttacattaatactagccttgtcaaagatcagatggtggtgggaatttaacttcctccttctctacaactatgcatactcactgtgaattaattcttcacagcacccatgcaactgctcaaatgcacaggcaggattggcctgtgtagggtctggccagagttgggttgagcctcaaaccaattgaaatagactgtattctgcctgcttcagtctagctctccagggaagctatggcagagggtaactgtgtgtgctaaggatgtagactcttgttctctgagctatgagaatagggtggctagcattcaaagctagctggtgctgctgctgctcttaggtccaagaggaaagatcctgctcctttttgaagctgccaagtgtatgtgagaaggcttagcaaggcagagaggattcagaacataagtgagctgaccatggaggtatgcagtctacacaagctgtttggtcagatctcaggtgattttcaagtaaccctgaaggtattgcccttgactgtcggtcctcatagctaagacactggggaactaaagagttcctaccataccagggcctgtgatgcctgctgagttgagcatgtgtgtgtatgtgtacttgcatgcatctctgtgcatgtgcagacatggtggttacacatggaccctggccactgaattgattgatccaggctttctgtctcctggcctgtggttagaagggcgcagagcagttctccagtgcccagctaagtcttggtccttcatgaagcctgagttgatgccaagtacagttatactctagttccttaggaaaatttcatgctgaccagaatgtttaattagtcagaacaagccattttctgaatgtgctaggaatctaagaaacatggatgtgtgcgtgtaattaaaataattttttctgtaactttttattttgacacagttttaggattatacaaagactttacatatgcctttcacccagattccctgaattttaacttgttactgctttcatagaattcataacaattctgtgagataggcatttttgtccttattggatgtatgaagaaagctgagcctcagagagaataggaactaacccaagatcacacaagaaatgagtggcagagccaggattaaaacccaggtcggtcagactttagtgcacatgctgaccccatgtgatgtaagtgtgaatgtgtgggtatcctgctccttctgcccacagagctttctttcttgtattgttgatctgctagcagtgaattgtctcaacatatgcctttatttcaccttcatttttgaaagatttttgctaggtatagaattctgtgttgacaatatttttcttatagtattgcaaaggtggcacttcattttcttccggtttgcatagcgtctgacagggtagcagatatttctctatgttttcttaggtctgtgatctaatatattgttgctaattttgtttaaatagtcaattatcttttaaagagactcaaataatagaaagatcttacatacacatgtagtgaccatttcctgtgttcatcattccattgtataaatccgcatttccatctggtttcatttcacttcttcctgaaggactttctttaacatttcttgatgtgagagtgtgctggtgatgaattctgtcagcttttgtatgtttgaaaaagtctttatctcacctttgtttttgaaagatgttgtccctggacatagaattctaggttaacaggtttttttctttcagtactttatagatattgcaccattgccttcttgcttgcattgtttctgaggagaaatatactgtcctttttatgtttgtttctctgtacataatgtgtctttttttctctgactacttttatgattttttttgtcactgactatgcaatttgactaagatgtgccttgctgtaatttcctttatgtttcctgtgcttgggatttttgaatctgtggatgtatagttttctttaattttggagtattttcagtcatttcttcaaatattttttctgtcactgcctctcccttcatcctttgaagactccagttacatggatgttagaccacttgacattatcatagagcttactggtgttcttatcatttattgtcattcttttttcactgtgtttcactttaggtaatttttattactgtcttcaggttcattgatcttttcttctgcaacatctaatctgtttaatcatgtcagccagtgtagttgttacctctggaagtttgatttgtgtctttgaaaatctattttttaccccgtgtaacttcttaaacatattatactatatgttattatactaacatatagtatatagcatatattctatatataataactaagttatatataatatatattatataacagttataatatataataactatttcttaatatctttatctgctaattataacatctctgtcagtttggggttggtttcagttgattgttttttctgctctttatgagtctattttcttgcttttttacatgcctgataattttttattggataccagacattgtgatttttgccttgttgtgtgtggatagtttttctgttcctataaatattcttaagatttgctagctgtggccagagtagggctcagtgtatggctaattattacccactgtgaggcccagcccttctgaggactctccccagcatcccgtaaatgatgagactttccactctggctgctgggcaagagcacagtctccagcctggtgtggatgccaagcactgtttcctctagtccatttgggcagtctttccccagtctcaagtagtttcctcatatacatttgctgatcagtgctcagccgaaggcttgagggaaaccctttgcaggtctctgccattccctttctgcatctccctctctctggtattccatcttctgaactctagctgctgtgttttctctgagcctcagccctatcctttcaacctagggtttccagtgggtttcacctgggtccccactccctgtgctgtggcctggaattttctgagggcagtaatctgtggggctcccctcctctgtttcatgtatctcaggggtcatcattacctaatatcctgtggcttgaaaattgttgtttcatatatcttgtctgtcttttggttgtttcaggttagaggctaaatctggtccctgttactccattttgaccagagctaaagtcttgggaccttttttttttgtgtgtgtattcatttgtttatagggaacatcagtctgggcaggcagtgttgcgtggtctggttatcagccttgattttcatctgggatgttcatccagttgattgtataaatatgtagacttgccctccaagtggcaacaaaatttctgcactccagactctttttgagaactttctgctgcccagctcttataaaaagctcaatattggcaattgatatagttttatctcctgaacactgtgaatcttacccttggttgtgcttctttttttcccctttgactgccagggagcttagacagtttcttagtctaccttcaataattagggaagatttttcaagattttttttgtaagcaaatttgtggtccagctttctctttttagcttacataacttttgccttatattttatctctctcagcatttgtagttgtgaataagagagagaaactctctctatacagcagatttgagcaagcagtgaatgtattagaggaatgattgggaagttcatagaatccttgggagggtcagagatctgggcttggagcagcagcccgagtcatatagaactggtccgggggagacacagctcctatgctgtgttctggcaggtgccaatgttgaaatgcatgtcatggctgcccctgaatttagaatacagagggaattctcagtctcaccagattcatgtcagttgaatctggtagagtcttacgtgaacatctgttgggagaagcctcagttatttgcctacaaaatagctgcagaggaggctcctacactggggagaatggttttggacctccccaaacacagtaggggtattcagagggattgggaggcttttcattgttattgatacatagctactttattctgatactattttaaataattacgttttcaaatcttattttcatgagtcataagtacaagtactccttgtgcacagtagtcgcatgccggatagtactgcctctccctccacacgagtgcgttcggttctcctctgcctgattttgaagctggggttgactcttggcaccagcgtttcttagggtaaggtaatgggatgcattctgtgggcaatgtaccccaagtcattagtcctcacagcagacttggctgtagcaggtagggaaatggattgtccctagtgccctgagtgtctgcttcaggctgggggacaagaagaaatctcaagtcaggtgtggactctcagtttagaagccccagggcagggatgatttgcagtgtcctgagagctcataaggctctatgggagtatggaagggctgaggccaagactgatgtgcaggctgggcctgggggctttggaaagtgaagaagaaaagctggaaatatcaagtatatattattattaactggagtcaccatgctgtatagtgcgtctccagaacttctcttataactgcaaatttgtaccctctaatcagcatttcctccatttccccacctctgacccctggtaaccacccttctaccctgtgcttgtatgtgttctacttttttagtttccacatataagtgagatcatgcaatatttgtctgtgtcttgtcgagtagatcttaagtattcttaacacatgcacacacacacacacgtgtaactgtgaagtaatgaatatgttaattagcttgattgtggtaatcatttcacaatgtatatatagtcatgtgctgcatagcaatgttttggttaacgacagaccgcatgtatgaaggttgtcccataagattataatggagctcaaaaattcctgttgtctagtattgcctatgctatactttatgttgttatgtttagagtgtacaccttctactcactttttttaaaaagggaactgtaaaacagcctcaggcaggtccttcaggaggacctccagaaagcagtattgttatcacaggaaatgacagcgccgtgtgtgttactgcccttgaagaccttctagtgggagacggagaggtggaagacagcgatattggtgatcctgaccccatgtaggcctaggctaatgtgtatgcttgtgtcttagtttttaacaaaaaaagtttaaaaggtaaaaaaaaaaaaattaatagacaacatatagaataaagatataaagaaataatttttgcatagctgtacagtgtatgtattttaagctaagtgttattacaaaagagtcaaaatgttaaaacaagttaaaaagtttataaagtaaaaaatgttgtagtgagctaaggttaatttattattaaagaaaaatatttttaaatagatttagtgtagcctaaatgtacagtctattgtagtgtaatgtcataggctttcacatttactcaccactcactgactgactcacccagaacgacttccagtcctatggctctgttcatgttttatgttttttaccatacttttactgtacctttgctgtttagatatgtttggatacacaaataccactgagttacaattgcctacagtattcactgcaataatgtgctgtgcaggtttgtagcctagaagcaatagggtaccattatagcctaggtgtgtagtaagctgtaccatctaggtttgggaagcatactttatgatgtttgcactacgacagagtcacctaatgatgcgttgctcagaacttatccctctcattaagcaaagcatgactatagatagatagatggatgacccttgaacaagatgggtttgaactatgcatatccacttaaaggtagatatttttcagtaaaattcacaccagtgtgcctgcctgtcctgcctccctgtccacctctttcacctcttctctgccatttttgagacagcaagaccaaccctttcccttcctcctcctcttcagcctattcaacgtaaagacaatgaagatgaagacctttatgatgatccactttcacttaatgaacagtaaatctattttctcttccctatgattgtaataacattttcttttctctagcttatcttaagaatagagtatataatacatataacacaaaatacctgttaatcaactgtttatgttatcaggaaggctttggtcaacagtaggctattataatagttaagttttgtgggactaaaaagtcgtatgaggatttttgactatgcagggtatcagtgccccaactcttgccttcttcaagggtcaactctctatatattaaaacgtcacattttacaccttgaatatataaatttttttgtttattgattgtacctcagtaaaccttggggtagaggcaggaagagaggaagctagagaggaaaagaagaaaaccaaagatgatagcaccttttgcagggcaggagagggggccgagccctcctctgtggcggctggggctttggtcaggtacctgaggatggggcctctcccagcccagctgtgctggcagcatgtttctctggaatttgcctctttgtgttaaaggtggagcctctgggggaaaaaaagcaggaggaggtccagggtgttggtataggaaggaaaactgagactaaatcttccagtctccagccagtcaccctgtggagccccagcagaccgtcatgtccccagcaaccacagagctgctgaaagtgttcaggaggagctggaggaccagccatcctgggaacactcctgtctagaatcttagttttcgtgatgacaagggacctttattttgcctttcctttttctgctcttgtccatgtactgttacgtggatgggatcctttaggatgcactcgccctgttccttcttgctgtagtgggcaggcttactgggccccctgtttggatagaggagatggggtgggtgcaggatagtgagacggggcactcagtggagaagtgagagggtcaggcatcggtccgcctcctagctggtgcaggagaagggcctgggccagaccagcctgtgccactgtctggctaacccctccctccctcaccttcttttgactcctccctcccctctaccctcccctttccatcttctctggatccctgggtgaggcccaggcggctgagcgtcctctagcagagggaattaacacacttaattaaaatgtccaatgaagagctttgcatatttcttaattaccatctgagtcttttgggggatggtttgaaatggggtttttcacgtgtttcctcatttagcctacggtgagccagccagcccctcagggctctagtgggagctgccaaagatgcatgcccagtttggggctgccttttggagtccagggtggcagggtagggtgtggagcagatagcccagctaccaagcttacccacctttgaggaagaatagggctggactttctgtttggtgaaaacagagccaaaggaaacaaggttcagatggatatagctggtgtctctaactgtttcacttgtcaccacagggcctgggggccgtacctcacagtcaggccaggaatggtagactatgagcagaggttacagggatggtgcaggcctcaccccaagggccctgtgcagcagggatgcgggtagcctggcctccttcccagctgcatggcaagggccgagtccctctgcaggtccttcctagcatttataccagcaattcccacttctgttctagaaactgagctgatgggatggctgagtcagcgggtctctgctaggactgggttactggtctgcacaatgaggaagcagacttgccttttcagccctgagcaccaccttctgaaagctgcagacattatctgaaatgggcctggctgctgggggctgtgggccggggatgcagagattcttttcctggctcagggactgatttcctgaaaacacaggcatctgagaggtgggcagcccaccaagatggcttagaaatggcagtgagttatgccacatctgtcctgcctgccctctcctcccggaactcctggggccctaggccctgagcccagctctgtggaccccaggaggatcaggatcccactgtttggccaggagctctgaagagctggtgtgtgtggtaagtgtggatgcacagccgagagcagactgtgggccagggttctggcttggctctgtgaggggctagctagtgggtggtacaccttctgccaggtcctggcaaaccctccgtgcagtctctggctaatgtctgtgctctgccccctgctctccccagtttctggcccttacagcagcctctccacccacacccacacccgctgtggaggcgacagggagaagagctgtccttcgtggagggaggcagtgtcagtggaggagtctggggacttactgcccactcagctttcagactgtgatgtgggcacaagacaagaccagaagtcctcatagccactggccccaaagctgtgggtggatttggcgtcacgtggcagctgtggagaaatgtgggcaaatgattttaagcagaggaatctcagcctcacatgactgtcgtttcatccagtcccttccccgggaatgttgttccctgtgaccccctcatctccatcaatcaaggctcagcccaaatggtgcctttttcaggaggttactgtgatttccccagcagagcggcctttccttgcatgggcctctcaggagacccttcccgtattgcctggcattttagtatttggatctgggtctcacttcaccactggatatggactgcttgaggccagaggtgcatctgctttgtcactacaaattctgtgccctgcacaacaggactggcacacagtgagccccagtgggtgtttgctgagtggctggagaagcctcactggcctctgcagctacctagaaaccaccagaatgtacaagaatctgtttacctgggacctgccagtgagatgggggcctggggcccatggggcactggtggagtgaatggcccctgttggtgaggtccaggtaggcagtggtagctgattgtgaagggccagcatccagtgcaccctgcattggtgggatttccagggtacatgggaccaagctcctctggacatccccatggatgtgcaagacccctgggccagtagttctcactagggtaagaaaaataactgtttcatgctgatgccaatagtgaaaaataagcttacatctttaggacaagggattgaatgattattgttaattgttttttctgaatgcagtgctggcatttgtgcttttgctctgacaattatgaagaaggcttttatgagtgactgaatccaaggtgattgcttggtgtctgttccttgtccagttgtcttgggctcaggggatagctctagcatctaatggtcatgaacccaggtcacagggaggagttctgggctcctctctgaatctgaccagtcactggtcctgtaccctgctctcctccccattctctccagccccaccacctctgcattgttcactgagatcctccatctctggcaagatttctgcccctagtctggcttctgtaggccattctgtagcagagtgtccccacccaaatcttacctcgaattgtaatccccatgatccccacgtgtcaaggacaggaccaggtggaggtgattggatcatgggggcggtttcccccatgctcttctcgtgatagtgaggtctcatgagatctgatggttttataagcatctgacatttcccctgcttgccctcactctgtcccgctgccttgtgaagaaggtgcctgtttctcctttgccttctgccatgattgtaagtttcctgaggctttcccagcaatggcagactgtgagtcagttaaacctgtttcctttataaatgacccagtctcacgtatttcttcatagcagtgtgagaatggactaacatgttttcttttttctaaagcacaggtctattgctctgattacctaatgctgtgtaacaaaccaccccaaaacttagtggctcaagacaataaaaatatttacatcgctcacgaatttgtagtttgagtaggacctggcagggaaggtgtggctttgttccatgcagcactgaaggcggcttgaagtctgccggctggagtcacctgaaggctcgctcactcacaggtctgctggttgctgcatgcgtgtctccctcctgtaggccttcttgggcttcctcacagcatggttgctgggttgcagggctggcttccagagtgtgtcagtgtgagcacactccaggcagaagctgtgctattttttctaagctagccttgggattcccacagggccatttctgccatagtcacaggcctgcccagattcaccccctgatggaatgtcagggttagattgtaagaagagcacatgggatgggaaatattttatgagcccactatggaaattatgaactgccacacctgttcacaccatcctgctgaagatcctttctgaagctcccactgcccttgggcgagaatccatgctcctccatgtggctgacatggcctgtgccatgtggcccctgcccctgcctttgtacttctctctgtctgcccctccctccctccacaactggccccagagatgggtttggcttaaatcaacctgacagccacatggagcttccatgaacaatgtttgctactcactcttcctcacacactgtctggcttcacttgccctgagatgaacctcagtctgaggggcctccaagtgtgtcccccatagcaacctagcctgttgccttctgtttcttctcacgagtgttttctctccctgtctctgtgcctttgcacacattgttccctctgtctggaattccccttcacccccacccacagcctttcccagtcccgtggctgccctgcctcctccttgcaggtgtcctgactgcccggccacctgcacccctgcctttgggatctgccgctttgctactgtcagacctttacataaaccagcacagcagagtgatgaggcatcgactctggctcaaatctgtgctcctatcccagctccaccacttcccagctctgtgaccttggaataataactaactcattggatcgtgatgaggattaaatgagagaacctaaataaagtgccaaattctcatctgctgctgaatagaggcccagtaagagtttgagtttcctctccttctttctagcatctcctggtaaatgctcagtaatgaattttctcaccctcatttggttgaaaaaggagaaatgcatctccttgcttaatcatgtgggactaaactaccagaagattacaagaacattgctgagccatgagcagagagaaaataaaaaagctcaataatgatttgcctgcttatttttaataaaacctgccagtggagctgaatctttgtcctcagaaaaagctcctctttgctgcagtggtgtccgagagctgcggtagaagcacagcggtgtgaccttgagaacagagctggcaggaggacagctcccgcagaaactccggcagctgttgcgaggcagggggacacaggaggagctcctggctcttccacctgccaggctgcaggcctgctgggatgccccatgctactgctcctctgaggctgagtgggagtgcctggtcaggtggctcgggatgggttctgcccaccccttatggttgggggactgagaaagtagccaggtagatgcagtgtgcaagttctccatttgcaggttctagcaccttccaccccgggcagttgttgagggcaggtgtgggctgaggaaggggtctttgccatttagaggggagaggagcttagcacagcacaaccccttacccacctagctcctttatgtgataccatgggcagaggctgggcagaaatggacaagaggagctccttttaataagctctgcctcaggtctgcagacacttccccagagacaaagcatggaggacaagggtctcggataccactgcaggggtgtaacacacattaccctggcagaagtgacgagggcatgggtagtcttagcgggctctgaggtggggaagaaggcttcagctccgagaaatgagaaaaatgagcctagaggaatagtgtaaagtcattgccttttgcagcaaagtaagaatgagtccctcatccatttcaagcctgagttggggtgctgggccccagatgttaaaaccctcactttctgagccctccttgtaccccacaaagcacttccagggcacctcagtgaccagtttctgacctttcagattggatcaagcccctaccaagtggggaaaggcccccaattccagacttggcctgggacgggctgttccctggagcgccacagcagtggcaataatgacctggcagaattctgaacccagcatgatctatcaaggagtacccggataagaactgagcacctggtcatgcagccacatcccagccccactcagctctgaccctggtgcaggagctgtcaccttaatgcccgttgtgtgaaatgtggatgacattagtgccacccagagttgagggctgggaggtatggtacccagtgttgctgcaagcttcagtgggcaggtgccacgtctcctctgtttactgttctcatgtcaattctgtgcctgactcagcccctactatgtgcctggaacatgctctgtaaatgctggggtcatgtgttgcctattatggtgactgcgggaatgcatagaaaatatcagctctggccaggaccccacacctaaaagctcctcctgcacaattcccagtaaaaaactttcaggggatgttttcctgccccctagacctgtgagcaagtgctaatccactgccagtggctggtgtctcatggagaggcaccttggcattagaaggtgttgcagggatttccaagttttcagctactccatgaaatttctgtgcccttagtggctttttgggaccctgctttctctcctctctgtgcttggaggccctggggagaagagactcagtgtcttcccatccatctccccaccctgatccctgatgcatgcacctttccctaaggtgcaagacgcagagcgtcgctgcctagggaagtgaccagcgtgccctgggatgcctctcttcccaaggaggcagtaactttccactccctttcaaaaaggaggatgctgtgttttccccaatgcatctgcctcttgctagttcagggttgccccactttcccctctgtggtcctcagccaggtgcctggggcctcatggcctcagagctgatcctccaggtatgggaggccccctacttctcaccttcatgtgaaatttaaggggagatttaaagcagtcagaatgctctttatagcctcgtttctatcagaagtttagaaaaggctgcttccaggtaaaattagaagagatcttgggcacatttctgctcaccccagaaatgttgttttaaaaatggggctgttctgacaccagctggtaccctacaattcacttctggcactgaccacccagagttggcgtggtggtcagcgttctccaacaagggcagaatcctgacctggcagaatcctgaacccagcatgacctatcaaggaggacctggataggaactgagcacctggtcaggcagccacatcccagccccactcagctctgaccctgggccaggagctgccacctaattgcccattgtgtgaaatggggatgacttgagtgccgcccagagttgagggctgggggtggtggtgatacatatattttttccatctgatattctggaaactgccttaccttgctcagttacctgctgcctccttccacttttaagcatttcccatgtgccttgtactttttacctgatttaattcttactacagccccctgaagtctttgatgttaatatactcattttcaaatgaggaactgaggtcctgggatggtgataacctcaaggtgacacagctgaaaagtaccccaataggatttcaatccagctaaccaaatctgggttaaagatggggtcttctgaatttagcccaaacacagtcagtcagatgctccttctgggtagaagatcatctttcccatagcaaatgctggctgctgggagctgagtgcacttgtctgttatgtggtgcactcttgaggcctcaaagctggtaaagggcctttgccaaggggtcctgttggcttgtcctgctccctccagggagtgaccagccaccccaccaggcacagcttgtggatgtactgccagcctgggaaatgggagggtgagggtacttttgttttgcctgccagcattacctgtcctcctgaagcctagtgcagaaagggctctgagccagcacagctgggcagattccccactgagcctcccagggtcatggcagagacatgataggacagtacagacaggcatccgtgcagggcccgtcctaatgaatgtcccttgactgccctcttcccccaccccagatggttagaaatgcagcagttggcatttctgtcactgccaggccccaggggagctgcacagggtgaggtcagaagccaaattctacaatttgggaaattagcagcatttgtaggattcccaagagacgtcctgttttctctcagctgttccagttgttctcagttggggtgtcactgcccctacagggcatttgcagatgtgtgagtgagtctacagttgtcacagtgactggggatcctcctggcatttacctagcggggttccaggtatgctaaacatcctgcaatgagctggacggtcagatacacaaagaatagtcctgtccatgagagacatggggaaatgacatttgcctccccgcccctggttccttagaaagccactgtccccaccaatcttcaggctgaattaacaggaaataaagggcaggcttccattccagtgtatgaccaacaacaaggtgtacatgggcaagtacgagaggagcctcctgttttgcacccacttaccttgattctttatagatggttcttgcatcagctgggttctcctgggtcaaggaagacctggatttgggtagtggaaatccatggggcagtgggatacctcctccttggcagcaccctggtgcctggcaggaacagccctcagcccacctggtatagagactcggtggcctcaccacggggtccctagcaggggcctgtctcccacttctgtatttctgcaactcggcctttcccctgtgctttttggttttgttatcttttcttcaaatgcagtgtgtttagaagagcctagctcagatgccatgactgaacacctctctccttgttgttttgcagtcgggaagacgtctctgattacgaggttcatgtacgacagcttcgacaacacataccaggtgaggtcctgggtgctcaccctccatatcatctggcagtggctgacctctctttgaaacttgctgagctggggtgggagtggaatggccctgggttcccaggctgtcattttgctatggaggagcttcccacctctatactggccccatccctgtaaagagcttgagcccttctgaaaatccacccctcggtaaagggaacatttttcagaggaaaattctaaaaatagagagagtctgtgttctcttgttcctcacaggcagatccaaaccatgatagtgtttggttgttcaggggagtcatcatgtggaagaggaacaagatgaaaatgagagtgttaggcgaacttgcgcctcatgcatggttgtaatggttatgtttgctgggaccttctctctctctcacccccgcccccccccacacacgcacacaaacacacacacgcgcgcacacacacacacacggttgctgaggcacttccttccctggagaggctggtgcgatgagcttgccctgccctacatgggcaggaggctggatgcggtgacctctgcagctcctggccctggaggcgtagtctggggtcaaccagaggcccagaggtggttccaggtgccctgaaggccaagttcttgggggttaataacatgtcactttcctggcaccactggtgagtagggaggtttgtgcaagtaaagtgaattttccatgcaattatagctttttgcaaaaggcaccaaacttaatcatttcaactcttttaaagaaaaaaggtgctgttttattccttagatagagacaaatgataatgcatttttctacactagtggattctgtgagatactaattccaagaggtgttggtaggtgttacttgaaaaaaagttgaggtagggggtggtgggttcagagcttgtacagatttagggaacactgggtgaacaaaagtaaatctactgctgtgctgcagggcttctcggagcctgactatatcagtgtatagttttgatttactgaaagagggatatagtgtgtaggatctctcagatgtatttgatcatggaatcccttggttatcgagttctcaaaggacaaatatttatagaacacagcggggactgctgttctaagacgtccctcctcctttctggatttacagagtatgtggagcacagctcactgcagactgcagctctgtatctactttttagtctgtctgtctccctctggaccaattatcctccttgccttaaatacagcccctctgtctgcctctctctcatttttactctttctttgctgtggtctcaatttttactttacctctgcttctactctgctatggtctgaaatactggctagccagtggacttggtgaaactgaccataggaattgacagaggctctgggagaggggccctggctgatgtgcacagcctcaggtgtggactgtgggatgttcaccttggtcacactttgtctttgttgtatcctctctgggccagggctttgtagcaccaagcctgtcctcctaatgaggggagttctactggatcggtttgaattcaagatgacagctgcaacagacttagttctgaagtctgacttggtattcatttatttttgtgcatgcatgtgtgtgtatgaatgatctcatatattattttgatttcttactattaagttacatataatgcttcttgttagtgtcccattgaaaacagtgagactcttggttggttggtgttcttggcagtggcaagggggtgacaaagggggcccccaggcctgtgcagtgggtcccattagtatggatcaaagcctcatctcctccccatgtcattcaagttcctcaaaatctcgccctacctccatgttcagcgtcgtctcccattgcctactgcttgtcccccatcctgtggtccagccgacttccctgctcctactgcccttggagtgacactgttatgcctccacactttgactcatgtcattgcctctgccggaatgccctttcctctcttctctgctgcgagaattctctggatgcatcaaggcccagagcacatgtttggtctgagcagcgaggccctttcatcctctgtcccctccgtgaccatctttcctatagcatcatcctcagggctggtttagcctctcaactgtgcagtagctcctgtgtgcatctggctctgagctgggctctgtgcttggctgaggccaggaccctctgggacccaccactgcattcatgagtctagcacagggcctgaccatagttggtatcaccagtgcctgctggcacacacacaaaaaaaacagcatggagagttggcctcgggttttagacccatcagatcaagaggcctcaaggacccagtgtggtgacaagaggagagaaacctcagagaggactgccctccccatcgcaggctttctctttttttttttttcaatattgcagcaggtggaattcctttcccagtgctcttaaaaatggtaattaggctgggagaccagggctccaattctgtgtatacagaggctcattttaatgaattctctggagatggagaaggggaaatgttattttgtttgtttttcctaacatggtggcagaggcattcgagaagtagacaagatccccagggtctttggggattcagcttacctcaccccaagttgtgcccctgcacagcaatcactccccaccaccccttcagacatccttccagcagtacaacctggcagagctgtcttgccttgattggctgaggtgcccagacagttcctagaatggaatctacccctccttccctctttccatcccacactttctgtctctggccccactactcccctctcgttcactcattctgacaaaagatgtttgtcaaatgcctactctatgtttggagaggcagaagaaagtggcctggccacagaatctggccctgccttcagccagggcatgaaggacagggagggggcgtttaaccctatcctcagtgacagctggtgagttctttctcggtctaaaactgaacatgcaggagaccctgaggggctggcatgaggacctgggtgtgtggagctgggttctacagacctctcaagactttttgtccacctggtaggccccgtgagatgcctcaggggagcaggtcttctacctcctcttgcctcacacttacctcctcacccccaaacacacatacacacatgtgttctcatgacacatgtactctctggcctctcaacaccctgcccatcacctcatctaaatccactcacttgaagaagtaaaaaaacaagagtcacagccagatgagattcatgtctgcagtggttctctcatataaaaccccaactaagtaattttcaaaatttatgatagaaaaaaaccttccagtatgtgcattgtgatgagacttggctgtctttggggccagcccccttccccttctgcaggcctggtctgtgagccgcctgtgtgaaacctgtactcatgccaccatggaagggttcagcctctgcaggtgctgctggggatggagggggaggatttggtggtagcagcactcttctccggtctctcatgggccctctatcactcctggctgcctgttagcatcaccttttgcgagattcacgggctcgggtattagcatgcttaaagcctcagcagtgattgtgatgcacttagagccactggcttgtccctgggcctcacaccatggcacaaattaggaaaccactgacttaacgggctgtccctgggagcaggtccctggcctgccagagctcatccagctgctctcaggaggacacactctcagagtggaggagcatttctggaggcctgtgaagctctgcctgcgctggatcctttcctgggtcccacagagcctgggaacagagtggctgcctccttgccctcccaggccaaggggttgcctgagatgctctggccttgcaggtgatcctcactgcattcctgccgctccgccctgaggctttcctctctcttctcctggggctgccttaacaaattgccgcagagtgccttaaaacaacagaagtttattttcttactgttctggaggttgaagtccaaaatcaaggcatggagggccttgttctcagaaggctctgggagagaatccccccagcttccagtgcctccgggccttcctcggctagtggctgtatcactccactctccgcctctgtcttcagcaggcctcctgtctctctgtgtcctcacctcttcttaagaggacaccagtcactggatttaaggacccaccctaaattctggatgattttttctctcaagatccttaattaatcgtatgtccaaaactgcaattttcaaataagctcatattctgaagttccaagtgggcatgaatttggggatggatacccttcaactctctccaaaatcctagtacctcccagtctgatcccaatggggactggaccttctggcctattcctcagcttgggcacctccgcaccccccagcatagcccctgcaggctccgagcccctccggcccttcacgtgcctcctgcccagcatctcgacctggtgaggccatttcccccgggatcctttcttggccacatgtctttttattctcacaaggtgtctccagatcatttctttgtgtaacattttgtacgttgatttaatgaaataaatatgagtgtttcctggggcctggccattgtgtctgcaggccacttatctggctgctcagcccataaatcagcacctgcccctccccagtgatcttgcccttctgagaggagctgagctccacacacagcacatcccagctgcttagggaggggacaaacaggagaggtcactgtgcatggaaggctatgctttattcaacatggtatttggttctctgctatctctttccaggtcagcacattctcaggtggcccagggggttgccagccttggcagcatgaccttaacaaacagagactcgggcctaaaaagccctcgcactgcctttgctggtgtaggtgaggtaggacccaatgatgaaaacagacctgagtggggatcaagccagaaggttccccgtggacacactcacacactcatggacactggaccctgacacccacccccaacccaggaatagaaaaggggcgtgaaaagagacacctgtaggacttccggcaagattctgaggttactgagcacttttttcttggtgtaattttccatcatctagactttaagacctacatgagctacggtttaaatataaatttacagctgagggtgggggttcacacctgtaatcccagcacttcgggaggccaaggccagaggattgcttgaggccaggaattcaagaccagtctggtcaagataacgaaaccctgttattataaattttttaaaaattagttgtatatagtggcatgagcctgtggtcccagctactcaggaggctgagatgggaggattgcttgagcctgtgaggtcaaggctgcagtgagccatgatcatgccactgcactccagcctgggtcacagagcaagaccctatttcaatcagtcagtcaattaataaatacatacatacatacatatttgctacattcctacctctaaagtaggccactggtctagatgatacaggggttaaattccatctgattaatttccaggttaaaaaaatgcagtactaagacgctgaaaagctcggcatgttggagtggagggcagtagtggggcctgtgagtgggctgttggcagggctgcattttgactttcatgggcctcaggcatttcgcttcatgggccctaacatgggctgaattgtgtctcctcaaaattcctgcatcgaagttctggtcccaagtatcgcagcatgggactgtagataaagatagggtctctacagaagtaaaatgagattattagggtggccctagttcaatatgactggtgtccttataagaagaggagatgaggacattgacattcacagagaaagacaatgtgaggacacaggaagggacagccatctgtaagccagggagggcctctcaagaagccaattgtgcctacacctcagtctcagactccagcctccagagctgtgaggagatgactgtagttgaagccatccagtctgtggtactttgttatggcaggcctaggaaacaaatacaggtctcttcctttaaaaacatgttaagaattatatttttacagctacattggtatagagatgaatgtaattcaggctggattcattataattatagtcatttcttctcctgattttaagagaaattaaaatggaaacattttccttggcccttaagtgtcttacgggcactgggctctgtgcccctcgtgcctggtgggtgagttggccccagtgactgggactgtggaaggcccgagggcgggttgggatccctgggtaggaagggtgcgccatggagggttcctgacccagacactgatgggatcaaagataaggagtttgtgggaggcaggcctggaggggctgggccgggaccaggggtggcagctgaggcggggcacacagactcagatacagctgtgtgtggaagggcaaggagggcaggggcaagggaggaaccatgcagggctgtgtgggaggtgagcgagggccctaggagagatggcacaggaagtggaaggggccaacgaacagtgtgtctgtgggttacatagagaagaggaagaggcctgaatgcgccccaggtttctgtctagaaatgctggaagaatatcagtgccatcaatacaaagaaaaaggaagagtccagtgggaggtaatgatcaaacagccaaaatgcttgcaaatggctgttctatcaggccagcctgtgagagactgggcaaatctagattcctaaagccctaaaaatgggtgcgttttctctaatggaatgtagaacggaggcagagtgccagaagggatcttttacccacagaatctaaaatgccgcacgtccccagcacctgggggagatgggacaggatcttctgccctggtagaggtggtcagagtgagggcacacgccaaggaggattcagaatgtcccctatgcctcagtccttttttttttttttttttttttcccttcaaaaagaggcctaggtttaagccccaggttcaagtcccacttcgctgggagaccctggccgagctttttagtttcttagtattactcttttttttaagctggaaattattcagatggaatttagcccgtctatcacctaaaccagtggccttaaactttggaagtaggaatgtaattaatttgtatttgaactatggctcatataggtattaaagtcgaggtgatggaaaattatgggccaaaaccactgttgatagaaatgtgcattactgtacagaaaccctgcaacaaaccaagataatagtgataaagtgaaacaaatgacaactttccacagtgtcccgaccatccctgcatgtgcacttgtgctgtgctttgcagctctgccaaatgatgctcaaccccatagacttcgggcagagcactggactgcagtcctcggttaactctagcaacatgaggatattttttatattaatagagtagagtttcattttttgcagacattatgttctggggtcacaatatgaggtgacactcttatgtcgtgaaatctgaatgccaatcactctggcaagatgaccctgcctcagagacccactggggcactgcaagtcatccaggtgttccctctgaacattgacccggcagaagatactccaggcgttggacttttgagggcatctaagaacttacttatggtaactacaaaatgaattaggaaagattactaaagcctggagcagagaactgcatcctgagtccattccactcattaaatgtatcaggagctactggtgggctcacccagtacccattggcaacctcctactccctcgcttgattagagactgtaaaagctaaatttggctttcccagcctctctagaggctaagagtaatgatatgactcaattctggccaataagacacaagcagcagtctgcttggggggaaggattccagggaagctcttgcttgctttttctgccttgaatgtggatgtgatgtctggagcagcaacagacagtctgtacaaagatgagaacccatgggccacgacagcagaacagaataagcaatagtccaggggcctggtgtaccaccactcagtgtgccaaccacactgcccaggctctaacatcctttctttctctccctcctctcctatgtcctcccgtccacttctttgtcagcacatgcaaattagaaatgtagtcccctcctagtacagaaagctgatgaacagtggcataaatgaaggagagttttaattttgtaggtgcaagaagtcatgtggttggcacactgagtggtgctaccatcaggcccctggactattgctttttccattctgccgtcgtggcctgtgggttctcatcttcgtgcgtgctggctgttgctgctccagacatcacatccacattcaaggcagaaaaagcaagagcttccctggagttcctccccgctccagcagactgcttcctgtgtcttattggccagaattgagtcacaccattaccgttagcctctagagaggctgggaaagccaaatttagcttttacagtctaaagtagtcaagcaagggagtaggaggttgccaatgggtgctgggtgggcccaccagtagctcctgatacatttaataagtggaatggactcaggatgcagttctctgctccaggctttagtaatctctcctaattcattttgtaggttaccataagtaagttcttagatgccctcaaaagtccgacacctggagtatcttttgctataagagttgaggggagggctggcacacatgaatccatttgtcaccctttgggaggcctctcagggagcttcaggccacacgaccttgcacattatgggtagcttttgaagggacccactgatattgatgaaatttaaccttatttaaaatttgaaggtgtatgttgttttcagaccacagtcaggaaataaaagagcaatcacatatttaaattgggtggtgactaaagtacaagccactctccattgggagaaaagtggcctccaggaccatacagactttgaaactgaggtatctggaagaatgcaagtacccgtactgtggccttctgagccaacatcccctcccccagggcgcattactgcgcttctggcaaggatatgcccagcctatttgccagagactgctgtctcatctctccaaagcacccacttgccagtctggaacctgaagtttcagcaggctcatttgcaagctaatttacatgactttaccctgatactttcatttaatggttagtggtgcagagcacaaacagcaacttcattgtcaaaggcttgtcatgcccagctgctttctgccacttatggatgcttccccagccctgggcccaggcctggccaaggctaaaagaagacgcacgtaacatgccttttcattatttcttttcctgagaagagaatcttgagtcaatttatgcaaattaccatgcagatttccattgcagactttattactgtgtcttgtcagaatgtggaaacaaaattgtatttcataataaatgcacatagcaaagaagacttcaacaagtgcctcaggaaacgtctctttcctccgggatcagctgggccaatggaagcttctgtgcagaaggaagcatgtaatgtactgtcattctgcactgtatgtctgaacccctgtagatactgtttaataccatgttcagaagaagataaatgtggattcagctatgaaatccatgctcataagattcctcacattttgtataaaatgaagggcctgccatttctcatatacagtgctgtttgtaagcacaaagatattaaaggaataaataagcattgccaggtttggagcaatctcatcccagcagagtgcagctcagccttctgagaggacatggtgcagtgcaggaggtgtgcccagcacagccgaggagggagaggagggtcatagggatcgtggactggctggcaggaaactccccaaggtcagacctgctgctcatgctgtgttgatatcctgcgtttacatccctgtaaaatagttaccagcaaaaataatttgctttgtacctcacaagagaaaatgaagttcagagaaagaatgctttgaccaagactccatggcaagctagaagagggaagtagtctcctttagaacccgtctctctgaaggtcagcctttcatgaggctctgggaatactcggttattgagatgtttgtagggattgcaaccacaaaggttcctagggcaaagaagctggggaaacattgggttcgtgtttcttcagtgcagaactcatcagagccttttatttgccagtgtgccttatgagaggctttactaaagaggctatctactcagggctagaatatgtagcctttcccagaaatacttgatcaccatttacttttgttccaaagatggtctcatggggctgtgtttcacataaccacactgagaaacattgctggagagtctccatggggtgggttctacagcttctcttaaacctctaggtcagtcggtcactaataacaattcataatctttgtttacgcagcatatcacagagtatgcattatcttcactttctctaactcatttgatccaacagtccttaaaggaagctgtgacttttcatgtattagagatgaggaagccaagggccagggaagctaagccatttttccaggacactcccaatccagtgttggtgttggcagagcactcagaccttgccaacactgacagaggtcaccaaaaacagactggggctcccttggcatattaccccatccaagtatgtttgagtggggcactctgccagctgcatggccattcccctggggcagggtgcatggtagctcctgtggggctggctatggtctgtcctggggagcattgacaggcattctagatttgccggcagacatatgctccccatcccaagggcctgtggagcgtcctcttcacctcagctgcctggcattgctgggctatgtgcatatcatggatctgggctttatcttcaaagaagaaatgactccctccctacccccacactctcatacccacatacacatacttctacatgcaaataaatacataattacatacacatgtgtatccccactcatccacgtgtctgctcacacacactcatacccaccttcccatcagtacacactgtggcctgtggtgacctttgagatgaaatgtaccctgtggcaggtcacaggaaatcaccaaggttgctggggcctttttcaggaggatatggcctacctgggtggctagttgttctttttgtctgatgtccccatatccctccaaagtaggagccacagatatgactgtactacagatgcagaggaggaaaaactagcatcggaaaggaaaagagggtaggggagatagctatagcagaaatactgcatggagctcagcatttacctttgagtttcctggtggctggagggaaaggaaataccatgcatggctcccacatactagtggcaaaatgctcccaggcttgcattttgagccagatattgctaacacttgaacaaggtcacgcagtaaggcagggagagtggtcaggtttagaatcaaggatttgccaggcatggtgactcacgcctgtaatcccagctctttgggaggctgaagcggaaggatcacttgtgccctggagttcgagaccagcctgggcaacatggtgagatccccatctctacaaaagaaaattgtttttttaattagctgggcgtggtggcacactcctgtagttccaactacttgggaggctgaggcaggagaattgcttgtgccaaggaggtcgaggctacagggatctgtgttcatgccactgcactccagcctgggcaacagagtgagaccctgtctcaaaaaaaaaaaaagaaaaagaaaaaaatcagggtttctctgccccagcttacaaagaggtatatgtaatggcttggcaggtagggcatctagtgacagtgttaccagcaagatagagactttcctcacatgatgatttgtgatacagaccctcacagacctccaaagtgcaatgccagcataatctggcttacttgctgctaaaaccatcctggagagtgtggacaaagcagcctaggcccgtggtctctgaggatctgatttggcacaagtctgagactagagtacccagcagaacagtggtagacacagctcttagacagagccccgcagccccgggaatcccaggagcaccattggctttgatgcttggcaatcttgtattggctggtaagcccagctgcctcgcaaaaccacgcctggaccacgctcattccctgtgacgaggagaatgcccatcagtgtagatctaactttgtggctctccatggaggtggcatgaatgacacccaagtgtggtcgtttctcattagttctagtggtgtggttgcagttgcttccagagaagcagcaccttgggccatcctttagtggctaccctagctgggatgtgctccaaaggagtcagcccatgaaggtcgtcttttatttcatcacccaaagcccatgatttatcatcagagaagatgcaaattagttcctgtgacctcgctgacttgctatgggacctcaggcaagtcacttcacttctgtgtggctctggcttatctgcaaagtgtagttagtgttcccagtcgtgcaagccactccccccttttcttgttaacagtaccttatcttagtcacccagcctctctacatctttcacacccatggagtcctgcctctgcttcttgatatcactcatgtgtcctccttccttctcactctgctcttctctgcccacacctctttgcctgtctaggcctttgcagcaggttccgttttgtctcccttgcctttatcccattcactatccttcaaccagggttatctttctaaagccccagctacatggaagtccctcttctttggtcgtttatcagttctttggctccatcctgttctctacaggcaattcacagtccattggtcctgaatcatttttgtttttctgaagaaactgtgtggcttcacacctcagggtgtactgaagccatcacttttatctaaaacaaacaatgtcctgcattgacccatgcatgtatttaccatttctgatgctcacaatttcttccagagaattctagtttccattagtatattttcctgtcagcctgaacagcttcctttaacatttcttgtagtgaagttctgcttgccacaaattctctttgtttttgtttatctaaaaatatttttatttcttcatacttttgaagagtatttttgctggatttagaattctgtttccacggttttttttttttttcttgaacacttttattgtgtcattccagtgttttctagcttccatttttttccagtatggcagccgtcatccctgttatttccttgcgtgaggtgtgtcattttcctctggctactgtcaagatttttctttatctttgatttttagcagttagactctgttatgaatagacatgtgattttgtttctttatttttttaatgtaatgcttggagttggatgagtttttgaatctgtaaatgtgtctcattttgcactcagaagacttttcaccattatttctttagtttttttgtccaattctccatctcctctacttctgggactccagttaaacatatgttaagctgtatgaggctctgtttatgaaatttttctcaattttttttctctttatgcttccttttggataatttatatgatctattttcaagttcactgactatttcatttctctttttgaatctgttgtttcagatgtatttttcagttctaagtttgtatttggttctttacttagagttttagtttctctgttgagatttttaaatctgcgcctttattatgagcttatttttatatttgagcatagttatatgaactatttttaaatgcttggctattttcaacatctgggtacctcagagttagtctccatttaatctcttttttcttgaatatggctgacattttcttattcatatgactagtaattttgggttatacattatgttaaaactgtggattctgtttgttcctgtgaagagtactcttggttttagtgggcagctaaattgtctggacccaaattctcaattctcccccccgtggtaggcagcaactgaaagttatgttcagatttttttgtttgcctgttttattttgttttcagtcttaggtaggctgcttagggtctgcttgggtcagtcagagatttgggtaacatttatatggagaatttggggtcacctctctgtatctatgtcacttccagggttttccacactttctggctgctgtagtaactttgcagattgttctctaatttctcaaccagtaagactgtttgtgccttatttgaggcaaatagatgatgtcaaagagctagaaattttctggtaactgaggcccagccaaggccctcttaaaagttcttgtttctattctgtccttagagagctgacttttctcttctgggaaatgaacttcaccttaagtgggctctgctgaactattatggctgatgaccataagattatgacagtaggtagccagatagtttgtgacccccagaaatattcagtgacagcttcagggtgcatgacaggttcagaaatgaagggatttcaggaaggagagggagtacaactgaatagtcaagagcagggactttgcattcagggaaactgattctgacactactgactgtgtgaccttagttctgagtaagccttgctttcttctgtgaatagcaccttctcatgcataagcatctccctcttgtctctcaccctgtacagggcatctgccactcctggacagcacaacctccccagactctgattacaacagaaggcagtttgcaaactttactgcacaaatgagttatctgagggcttgtctggaattctgattcccagagattgtgattctgtctgtctgagtggagctcaggaatcaacatgtttaacaaactcctgatgtgattctgatgcacatgactcgtgggctacatattgagaatcattgaatcactggccagtgggagagattgattagtatgagatctttccagtttaacagagaaagtgttaaatgaggggccctggaccaacctgagggctcagaaaatgatttgtagaggaggtgaatcttgaattctgaataagtataaaccatgtggaagagcattccagaaaaggggacattattagaaaaggcccagacatacaaagcaacttgtttatgaggagttctgtacagaatattatttctaaaatataaagtggaggctggtcaaggagggaatgagtccatagaatgccaggggcaggccctgaacagcattataggccagcttgaagtgtttgagctatctcttagaggcagtagatcatattaatatgatcatattaatatttcagaaaaataaccctgtgcaatggtttcagtgtcaccaccaaaactcatattgaaattgaattcccattgtgacggtattaagaggtgatcctagaaggtgcagctgctttaaaaaaaaaaaaaagtggagcctttaagaggtgattaggtaatgagggcttcaccctcatgaatggattaatgcagttattgcaggagtgggtggtaccatcggagtttgggcccctttttctctctgttgtgtgttcactttcccttccaccttctgacatgggatgacacagcacaaaggccctccccagacaccagtgccatgttcttagacttcgcagcttccagaattgtgataagtaaatttctttttaaagtaaattatccagtctgtgattctgttacagcagcagaaaatggactaagacatcctgcctgctacatgaaagattaattacagtggaaagcatgagggatagtcagaaagctgttggtgttatttaggtaaaagaagttcagtgtctaaactagggcagtggtgttggggatggagaaaaagggggctgggtgagagcccttaggaggccaagcaaccagttcagtattcatttgatgtgagggaacagacagcaagtgaagaggagcaactcaggagggctttcaggcttccagaggcgtgggcgcctggatggtcaaggtgccatttattgaaataggaaaaatagcagaagcaggtttggaggaagatgataggctctttttggaatatactatatttagtcagctgtctagtggataattaagtgggatttgtagtaagtagctggatgcatagatttggggctcagaacaggggtaagtcctgggttatagattgggaactgatcagtatatcatatttgaagcatcgagagtaaatgagatcccctctgaaacaaaacagtggaaatgccaacattttagggaaagaaaggaagaagatcctagaagagaacaataaggaaccgcaattagagaggcagggaaagccagaaacaagtaaagtcgtggaaagcaaagaagaaacaaatgccatagaagaggaatggtcagcagggtcaagtgtgttgagtctggactatacagtgtcctcatgacttgataatcaaatggctattggtgaccatagcaagagctatgggcagagggacagaaaccagactgacctagttgagaaatgggtgggcatagaggaaatggatacagtgggtttgaagtccttttccaagaagcaagcccattgagaagaggtgagagattggcagatggctagagagcaacttagtgaaaatgagggatttttccactcaaaagatgtgagaatcttgagaatgtttcttggatgaaaggaaagagtgagtagagaatgagagactgagatatagaagagaaaggagatggctgagaaagcatcatccagagaaggccagtgccaagagggcctaggaagaggctttctttaaacaggagaaataacgaatacttagagcctggaggcgtgtggggataaggctggacatatgtagacaactttgcaaataccttttgaatcttgactgcagtctcagctgtggacatttgacaagtcgcttagcatctcttgtcttccattttcttagcagtgacacagaatacagaagagcctaactcatcacatagatttattgtccagattaaattaagtaatgtatttaaagcagttagtacaagagctgggaaatgataaagtgctgagatgttgttactgtggatgtcattgttactgtgataggacgcaatcaaggacaagtagcgtgtttttatatttgcccatagatttgccatttctggtgcacttgtattccagccttgaagattctaatttccatctacaaaatttctctttagcctaaagcatctcttataatgagtgcatgctggtgacaaattatgtgactttcccttatgtgaaaatgtttatgttttgtcttcatttttgaagaaaattttcaccagctatagaattctaggctgacagggtttttgtgtgtgtgtcttgttttattttttaagcagtttagagacgttgttcccttgtcttctgtcttccattgtttctgatgataaatcaactataattcttaccattgtttccttgtatgtaatgtgttgttctgttttctggctgctattacggttttctctctacttttttattttcagcaatttgactatgacataccttggtttggttttttacagatttatcctgttttaggttcactgaacttcttggaactgtgggttgatgtttctaattaaattgggtgaagttgggggctattctcaagatgttttttgcttgcatctgtttctactgtcctgagactctaattgcattttttgttttattattttttgggagacagagtctcactctgttgcccaggctggagtgcagtggtgcgatctcagctcactgcaacctctgcctcccagattcaagcgagtctcctgcctcagccttctaagtaactgggattacaggcgtccgccaagatacctggctaatttttgtatttttagtagagatggggtttcactgtgttggccaggctggtctcaaactcctgacctcaggtgatctgcctgcctaggcctcccagagtgctaggattacaggcatgagccaccatgcccagcttccaattgccatttatgtcagctcacttgatattgtcctaggagtgcttgaagctctctttatttttattccatcatttttctctctgtgcttcagtttgaacaatttattttggcctgtcttcaggttcactgagctttcctctgcagtgtcctagctactgttatttaaatccaatgcatttttatttcagatattatagtttttagtgttaaaaataccattttgttttgttttagaattttcataaatctcttgacagtcacccattgtattaatttttaatttttttttttacctatttataagagttttaaagtctttgtctactaattcaacatttggatcatgtaggggtctgttgagttttttcccttgattatggcttgaattttctgtttcttcacatttctagtccttttttattgtacagtggacctcatgaataataagttatagtcttggattttgttaccttcctctgaagagtgttgttttatcttaataggcaattaaatgatgggcagttaatattttttagggaatggttagttatcatgtatggaccttgttaagacagatgtcttcatccattcaggctgctataacaaaatagactgggtaacgtataagcaattgacatttattgctcacagttcaggagtctgggatttccttccaagatcaaggctccagcagattccgcatctggtgaggacttgctctctgcttcaaaaatgtcacctttatgctgtgtcctcagtggtggaagggacgaacactgcgtcctcacatggcagaggggagccagggtgctcccttaagcctcttttataagggtactaatcccattcaagaggtcagagtcctcatgacttaatcctttccccaaaggatgtgccttttaatactatcacattgaggattaagtttcagcatttgaagttgaggttacaggggacacattcagaccacagcgatagatttattttggttttctctgagtcctctggtgtaaccctcagtcctgagatgatcttgttcctcccaaagccagcctttctggtgtttcagtggagtctgaggtgtttttgaagttcttttaatttggtgggactggggagtttcgtcaggaggcaaattgatttaatgtagaatctgcctagttttcttccattccttgagcggttgtaactcctacctacttttttttttttcttttgagccagggtcttgctctgttgaccagcctggagtacagtagtgtcatcatggctcactgcatcctcagccccaccagcctcaagcgattcttcccctcagcctcacaagtagctgggactacaggcaggcaccaccacacctgattaattttcattttttattttttgtagaggcaaagtctcactatgttacctaggctgctttcaaactcctgggctcaagtgatcctcctgccttggtctttcaaagtgctgggattacaggcatgagccactgcaccctgcctcgtcctgcttttgatcattcttcagtgcttgcaaattgttatttcttgtatttttccagatattaaaatagttttctgttggagggtttgtttgatacaagccactcagccattattgaaagcaaaacttaggaatatgtttttgagcagagctgagggctcagttacacccagagacaatgcctatgctttggcgccatctccacagctatagaagttcttcagtggctcagtggcctggtcagatggagagtgtggctagaacaggtctgagagagtggacagttaagggaccagaggtttctctgttggggaagctggaagcaggaattaagagagagctggagaagatgggatgttggccttgttcaggttcctcgttgctgcctctggttagtctgttatgggatgtgagagaaagtatgtggatgttcagtaatggtgtttatgattatggaggccactgggttgagctttgctgggacttcatccaagtggcacaatttcttgtttcatttggtgacttctctgccctttgtggaagcagaagtgccttgtgacatgtgaggtgtgatggggttgtcatcattacagttatcagtagcattaccatcaggtgcctacctttgagagatacgtttctccatggttctttgcttgttaattaggctatgttaacagaaacccaaaataacagtgacttaaacaaaatagaacaatctgagcagtccagcgctgctgaagtagctcctcagggtcagggagtcagccttcgttgatgtcatcgctcctctgtcatcctcatctggatgggccactatgactcatccccaccggacagtgggaaagggagcagctgtgggtactccctacccacagaggacctgaccccaaagatgcctacatcacgttcacatcccattaaccagaatgtagccgcccagctgcaaagaaggctgggaaatatgttctttatttggggcagccctgagtccatctgcacacccagaattctgttactatagaaagggaaactacatactggggacaaccagcagtccctgccaccagtcctaagctcatgcacctggttttagttcaaaggtgactctacaaaaggagcatgtcactcctggggagcctgttgagcattgaggagttgagagacttctacctgctatgcacatttctccataagggaatcagaagacaaggattgtcaatctaacatacacctgtgaaggaaaaagtctgcatccacaagcactggtcattgcagatttgtgcctcggtggctacactatgcgaagctgtggtagaaagagcccaggtgctgccaagtttgcagctctgatcttcccagccctgctactgatgagtgaagtcacactaggcatgtcctttaaccctctggtctgttctttcatctccaaagtaagggattgattggattgtatctaaggtgttttgtctagtgcccacattctagcatcgtatgctccagagcgtagaatgaccccccatatctttgtgttatgaggcaagcttccaggagggtgcaagccagtctcagtcctttgtggaacgagttgggagtgtgactgtgtaaacatgcacacttgtgcacacacattggtgcatacctttgcattcagcctggggggactggagatatgaccttttctattttcttgggcttcctttggttgtgttttttgcagtcaaaaatcatggcattccacacaattaaacttatttattaaactttatttcaaaggactttttctaattttagtactgttatatgttcattgtggaaagtagagaaaagtgtaatgaaggagtgtaatgaaggaaagaaaatgctctgtcactattcagaccgtgatgctattaacatgttagcagattcccttcacttcagtgtctaagaaaacatgaaaaatactcatagatctatttgagttaatctaattgggatcactcgccacatgatgttttataacctgttttttgtttatttgtttttttaactggataaccgtttccccaaatccttaaatattttttcaagaatgtgattgttaacagctgccaagggttctaatcacatggatataccacactatgcttatttagtgccgtggacattcaggctgtgtccaagtctttgttattattgattacatagcagtgatatctccattttacattgacagcatctcagtcctactgacaggtaccgggtgcctgtgaggcccagagaggttggttgcctgcccaaggccacacagcaagtgagtggtgggtcctggccatctggccacaaggctggctgcctctcacaggtgccagggcagaagaggcataggtgtggcacaggggagctggtgacagcttccaatgttttggcttggggagaaaagagccagtggggcctcccagcgagaggccactctgggtggtctgcagtgcccgcacctgagaaaagccatgctgctgtttgcacccacacagcagcaagctgcctgctcctgccccctgcctcccaccctcccgaggtcagtgttgagcccaggcccatgctttagggcagagggaagaggctttggaagctgcaggttaggccatgaagggaacaaggcagggagtccaggtggggagggcaggatatgtgcgttgagtggcctgagtggccttgctcctggggaggcctcctcaccactgcgctctcactgcttctgaagcacttgccctctccagagaagatctcaccctataaaggccaccctcatctttcctcagcttgatccctcagtgagagagccgctgagtggtagcagggaggggcagggaggacagagcatggccacattagacctgacatgagcgtcccctcttgctggttatgccaccacctgtggtcgctaggcttttgcccctttgcatgagaccttttgattttgaccgttctgtgcttttctctaacaggcaaccattgggattgacttcttgtcaaaaaccatgtacttggaggaccgcacggtgagcacctaatatcaggactgggaggggcagggagggttcctttgggcttatcccctaggacccttagctgggcaccactgagagcacctgccgacactaggggctggagctggtgatgccagcattgcagagcccggctctcccagtcccccggaccaggaggacctcactgccccactgacccctctgcccatggtcctgccctccctgagacaggtgcgactgcagctctgggacacagctggtcaggagaggttccgcagcctgatccccagctacatccgggactccacggtggctgtggtggtgtacgacatcacaagtgagtgaggctctgctcctaagggagggtggctcatagggggtccagggcccaggtgtgaccctggccaggcctgtgtgcatgtgtgtgcacacgcatgtgtgtgcacacgcatgtgtgtgcgattgctccctgaatgcagaaaggcagggagcagtggtgagttgcctttgaacaccaacatggtttccactgctccccaccctcctgcaaccgacaggggtttatagggccaggttggtcctgctcggagtggaggccagcttgtggtgtgagcagatgctcacaaggttggccctgctccagcctctctgcaccctccctctccctggctgtcagaaagctccctaaggagctacttctatatgtgtgtcaccatgggagaagacgctggtccctaggccaaccccggcccagcagctgtgggtgcaggactccctgggaaggtaggcaagggggtctggaagcgcagtaggctggtaacccttctccagtactgtggctcttcaggccagggcaggtgttcttaacaggactgcacagcctcaagggcgcacagggccagaggtgggggtggggggccgaggcagaggccagacctgcaaggctcttgtaatggaacacacctgataagccctcagggctgtggttaccctgaagtgggcgaatgccctaggtgctgtccacagccttaaaaatcacacaaggaagcatgcatgtccccgcgctggtgcatgcccccgccacccagcctgctgccctggctctgcccaccccttctgtccacctctcttctgaccacaggccccctccacacctgagtgcaggtgggagctgggcccgcaagggcctgggttcacatggcctgaggcacatcagaagggataccaggctgtgtgaaactgaggcttctgaggacagctacctcccctccccttgggtgtgcaggctgccgagtggtgggtattgccttatagctgctctgccctgcaaggcctatcatggcagctgaggggggtcaggctgcccagaagtggccttgtctctcctggatttttgagtgcacctggctcccctgactagtcccggggccacctttcccctcctctcatctgcagagcctgagggttctcttcagaaacccctctggccttccccaaactctcctgagctcccatggtggggacaccactcagtagggcccttccttccctagaggctgctgtgtcctcctctgcccaccctcactgttcccaaacttgccaagtcgcgcgcgcatgtgtgtgtgtgtgtgtgtatgcacacacacgtgtgacccagttctcactctccactctgaatccccagagtcaggtctctcaggtgggcccctaaagccactattccatgtggcaaatcatgacactgtgatcttccagatggggtgattcctctcccacaaagggtggctgaacagtgcaagtggctccccagggccgcagggcagggcccggttccctctgaaaggccctacccagctgatctgtgttgactgagctcacacccctccctgggtatctgagggcacatgctcaccctccctcctgctcctggctcacacctccccttcccatctcccactggtggctggccctggctttcagtttatcctcactttctgcctccagatctcaactccttccaacagacctctaagtggatcgacgacgtcaggacagagaggggcagtgatgttatcatcatgctggtgggcaacaagacggacctggctgataagaggtaggtgcaagggcacacaggtgcagggtgccaccctccactcctctgtaactgctcctggacagggagctctgggatgcatgggtggtgtgtctgtgcttctgaccatgcatccggaaaaggtcccttgagacactaggagctttgaggacacctggtagactctcatccatgggtatctcatctgtgaagccctgtcttccaccaccaggcaggggcggggcacttctccgtttgctgtctacacagagcactgtgcacctggcttgacccagcagtgcatggtctaaggccctgccatggccacagccctgccccagacacagcagtcctctaggccccagcgtgtgcactgtgaactgtctgtgcctgtgaagtgtctgcaccaatgtgcgtggggctgtgaatgccctgggccctaggtgtgagcatgcagagcattcagaccacaaacctatggccgtagcctgcttagcctggtttgtggctgcgtctggcatgaagctttctctgaagaggctcctccatgctgccctccatgcacagggagaactgaggtgccatgtgtgtacattgtccactcattttacatgaccctgacttgggcagataaagtgacaggccatggactccagcaagcagtgtgggcttcctgcagcgtcccttgaccacctgaggaatcatctgaattagagcctgctttactagagttctgtccttaaagtaaggaaaactgggctcaaatcccagtacaaagggtacccaggcccttcataccctcacccacttctgcctgccccatcatggagccctctctgctaagtagctttgtggccctgggggagacacttttagcattagtgttctcacagggaaaatgcgactgataataccacccagagtggcactgcctggcttgaatctcttcataagcacaggctctgcagtagtgactactgggaaaggcaggtatggggcagccctaccccagggcctgctttgaagctgagaagacacaaaggaaggagtgggggaagcggatagtgtcctactgttccctggtgcctgctttgtgctagcgagactgtggttggtgcccgggagggacccttgggatcagagcctgtcttcaggactgaccaagggcccagtgggctccctctgccctgctgggtgggtccctcctcatatctgccagggtctgcttctctgctgagctgatttccccccttcccctcatctctaggcagataaccatcgaggagggggagcagcgcgccaaagaactgagcgtcatgttcattgagaccagtgcgaagactggctacaacgtgaagcaggtgaggacacacctggcacggggcccggcacggggcccggcacggtgtagccctgtggtcagctgcaggctcagagctgccttgccctgaagggctggtgatgggattggggcagccaaccagaacacccatagatgcgcccagggaggggagagctaatttccggagctggtaaagcccaaaagagggagggaccactccgggcatggcatctggagaacataagtcaccagccaccgtagtagttgccagtcacggcccacgtagcaggccctaagagtgtccagccaccagcttccaggaggctgagggaagcagtggttccctagcccctcaccccactttggatgacaggtgcaggaaaattcaatctgatcagcatttggggttcatgccttgcgcttagcaagtgctcagggctgtggagggcaactcaggcctgggggaaagagcctaccatgatgtggttggaactcacaggagggcgaggcagtggagttagggctgagccttgcagcatgagggcccctgagtagtccatgggtggaatttagcaggtcagcagacagggctggaaaacattgcacctttatcttcactaaccactgacccgtccgtagcactgaaggacgtctgatttgtccttcaatgatgaatgtaggcaatgacactcagtcacattagcagtgcctatggctttaccaccaatagaaatcacagatgccttcccatcacctcatagtgttgcaggtatcttgaacttcacatctatcagtgtttcagcatcacactacttattagatctcttgctagttctcgctgttcaatgtgtttcataaggaagcacaaatgtcgatgaagttttatttcagtactcagtagtcccctttatcatcctatgtaattgatttcacatacttcaaaggagtccataggattaaccagattgccagaggggtccttggctcacggaagggttaagaactcctgccgttggggatgagaaggacttggagaggtggtgaggagggagggcatgccaagcaggggagcagcaaaggtgtggctgcagggtgcccgaggtatggggaggggactctgggtgaggagtgtggttggcctggcggtcgcttctgccctgccaccccagcattgctgggaacccttggcaagctgtgtatacagcactggccttctggatgcagtgatggtttgccctgtgtggacagtgctggtggcagtggggaaggtgggctggcagaacgacaagaagagacaagaagggtggaagggacactatgtgacactgggggccccaaagctccaggactcagtgccccaccctaactagagtgtcctcatcagggcttcactcactcccatctgttcccagcctcccttggtgtggggctgaagctgtcatggtccttcctgctccctgggggcatgcaggagagactgggctgctactctttgggagccctaaagtcatgggaagcagggaagcagagggagggcagggcagcaccaggaggtccatagggcaggtagcatctgcctcagccgtcagggtcagggaggcactgatgcccctacccccagagtgctctggaacccatgcagtggtttagcaggagttaaatgtggtcagtttcgaaccctgtgtggctcagaggagtgtccatgcagtgcagactcctggatctaaatgtgagcatatccactcacagaaacccatacctgaccctagaaacccatacctgatcctagagcacccttcaaaatccctagtggcattttggccactagtagaggctgtgactgttttgagagccagacaggcagatcagagccgcccagggccaatgccatgaaggaaagctcaggaaggatggcctgggcccttttacccttgcctactaatggctaccccactgcagagcctcctctgcagcccgcccacaagggtctcacaccatgctgggcccaccagcagcttccccccttgggccctcatggcctttagccctgtcacccagcccgggtgctcagctggggctgggctctggggtgaggccatgaataagactcaccctgtcttcagagagctcatgcagtggagggtatgagcccagagcccacccagttcctgcaattcacatttgtgaggacagcgggagtgctcctgggttagtcctttcaggctaccgtaacaaatcactataggcagggtagcatataaacagcagaaatgtattgcttacagctctggaggctgggaactccatggtcaaggtgcaggcatattcagtgtctggtgagggcccatttcctcctagatggcaccttcctgctgcatcctcacaaggtggaaggggcagacaggctccctcgggcctcattcataagggcactcatcccgttcatgaggactctaccctcctgactaagcacctcctaaagccccacctctttatactgtcacattggagattctgtttcaacataggaatttgcagggggaccggcattcagaacctagcagttcagagtcttctgtgcctcatacttctgcctcgtacctgtcacctccaagattccatctctgccagcaccccatctgccacttgccacctgtcccctgccacccacacctgcccaaacacacacacacacacacacacacacacacagaaaacccacatgtacgcagacacacaccttaccaaggacacacactatgcacacattccccccacacttacacaaacacacacataaagatgccacacgttcacacacaccacactcaaacattcccccatatgcttacacaaacatacatgcacctacccacacgcaccactcacaacacacacattttccacgcagtcctacagataaaacacatacactgtacacacactcctacacacaataaacaactcacactcctacacatccaaacaagcccacaaaattgtgttcacactcctgcatccctcgcgctctcagagaagcctcaccactgtgcccatgcagccctggccctgctgttcgctgccttggcgccggacctgcagggctccccaagcagagtcattcatctcaagggcaagtcacttccccatgcctggtccccatgagggctgtttgcagaagcccaccttaaggcctgtcacccagaggcccaaaccattttctgcaccagaggaagtcccttgcagtcactgccatgacctaagctcatcccagtgaccctatggccagtctgcttgggtgagaggccacagctttgttccttccttccacaagctactgaggcctgcccagacccaatgctgtgagaggtgggggagagagaacataggcacagcccctgcctttgagggcaccgtccgctgggcagatgggagagtaaagctgcaggttgggaggggaagaggggtgagggtgcaggtgcagtgaggagcagaggggagggccagggttggggttcacactgcatttcttcatctttccagctttttcgacgtgtggcgtcggctctacccggaatggagaatgtccaggagaaaagcaaagaagggagtatccttttcctttgacaagtgagtgaaaagatgtatagaagccatttattcactgaatatgttagtgcagtggacagacactcgcccagtccccgcccagccttccctggtctgccgcgaatggcacggggcctcctctaggcgggatgcagctgaaccctatggtttggagcccccgtctggctctaaccatctacttcttcttccagaatagcaggaagataccaaaggggtgtgcacagagtgatgctgtggggtggggagtgagaaacagcgactttgcccttctttacagcgagcatgtttatgggtttcatgaacacaggcagagtctccactgcagggaagtctctgtcactggggatatgatctcaacgtggttcagtctactcaagacagctccccccttcagacagatgccccctccttgtcccgcccaccttctctacccagccctgaacagctcctgaggctccccactgatctgtgggaccattgcgcatcacccacaaaccagccccaacctgaagagacacctagatgctgaaactgaggttcagagaggtagtctggtttgcccagtgtcacacagcatgtaagttacagttaggattcacactcaggcttgcttcctccatatccagccctattccatgtgggacactgtccctctaagggcatttgagagaatcagatgaaaactgtttcagcaggggaagccattgcccacacctgggcctcccctgcatctagtcagatgtccctgcctgagtaagccaccagaaaacaagcatgcagatccctggctggcatcctttacagtggacctgtccctacacagcagctctccaacatcccccactgatcctataggcctctgagggtagacatccctgacagatcaaagaagggccctgggaagatggaagggcacctttgggctgatgagaatcaaaagcaaaagaagcacacagcttaatgttggaggcctcatggagctgctggggcagggcgggcaggacaccaggagtcccagggctgcagcaagggggagcctgacacaggcctggagggaagctaggcctctccagccttgctcaaggagctctcagagcagactcgagacccaccccccgggggggtcaggaaggctcaccaaggagcaggtgccccagcagtcccacggtctgtgtgtcaccagaggacaagcagtggccgagaggagggggtttgaggagtatctcctggttggtcagttatgagactccaatcacagataaggaaactgaggctcagaaacttaaactagggcaccccacggctctcagtagcagagacaggctccagagctcaggagagagcccctgtggaatcacctgtcacatgggactcctttgaggttccaggaacatacagaagccaacctgaagggcaaacataggagcaggaacaagggagaggggcagacaaggtgcaggcgatctccgctgtgcctgccagcaaggggaagggttgcactgcccgctctccatcccaccagctcccaaggtgtggcacactggccggggtgagtggtgatcgtttcattcacattctcccagagtcgcgctgttgagggctccaggctgggcccacagtcaggtcagactgggctgagtgcagggtgacagtgagctcgtcatcgtcctggtatgcctagcgtttcatccagctaccactgacctttgggccccttgggagaaaggatacatggcaggttgcaaacagactgcacagggtgttgtgacctgtgtccctttttctagctaaggggtcccctcatctgggtagatgtacccccatcctttcacttctgcccaggagccagcttgctgggcctctcacgaggcaggtgctagagcggccaccagaggtcccagagggaccaggcagaggcagccgtcattctgcttctttcgggatggggtgttggcatttctgcttactcacagtccaaatccaggtgttttgaaggtgtgtgctttggggtcatgttcataattgtgttccacattgagagcagccacacagaagcactgctttgtggcgctgtataaactgttcacacctggcctcacttgctcagctcaggacttggtgaatgtgtggcatgaggtttccgtctgctgcttgcaggtctagatggggggctgctgcacctcttcttcacgttcgagacaggaggacccctcagggccgctctggccaatacttctgcccagcagcaccctccactggtctgctctcaacaaagtaggagccaaggggccaccaaatggtagagccataagccccttactggttctacatacacaaccccccaacccccactttctacccaaatacagtatgcgcccatcacatgggccccagactgtttctgaacaaggctggcttacgcaaagaaagagcagtagtgtgggcacttcatgaagtggctctaagcaggtgaggacagtgacgccgcaaaccagatagagcatgctcaaggcctcccagctccttaattcagagctggaaccacatccaaatgactggattccacagccctgttgcactctctgatggggctgtggtgtgctttgacattccagatacagacaggattgtgctgcagtagagtcagaggcactgggattggggaagcatatccagcagtagggggtaagtttgtaacaggctgtctgggcccacccatcacttccaggaaccagggagaagggacattgggcactgaatgtggcccgtgatgggccacacttgacccagagggaagaggcgggtgtgctctggccatgcctgccggaaaggcacatatctaacctcttgaggcttgtgagaaaccgtgagtttccccttctgggacattatttagacatgggtccagtcattcttccctgtcctctcaatcagcgggcagcccctgagcactgcatttcagcagcatgtggcgtaacaaggaaggaggtgtcattaaatgagagcctttgggaaggctcctagcggaagagctgggcctgtgctctccaattctgcagccacatgtgggtgttccgacttaaattagttaaaattcagttgaattaaaagttcatttcctcacttgcactagcatccttgcaagtgcccagttgcccatgttgctaatggtgacatcttggacagtgcagatatagaatatttccatcactggagaaagttctttggacagtgctgttctagaagtatcagtagaattggtttcccggatgtctgtgcattgggactctccaaagaacttgttaaaaacacacatctggggcccatccccacatctaccaaggtaggacccagtgagacgtatttttaacaaacatcccagaaaattttgatgcaatccatttgagaactattgctgtgcagtgtacaaaagtattgtgatcaaattgcgcatgagattgttttagtggtcgtaggtgacttcaatactgggcagaacgtaatgctgtaacagtggccaaccttcaagctagaccactagttctcaaccaggactgatagcccttccctcccctccccacaggggacatttggcaatgtcttcagacgttttggctcaccataaattgggggagggggaatggggtttaactggcatctcatagatagtggtcagggatgcttctgaacatcctccgtgcacaggacgccctcataacaaggaattgtctggcccaaaatgtcagtagtgttgagtttgagaagcccatccacaaggggcttagcacagccaggtcagtgaaagtagaaggctggggtcaagatagccttgggtttgtacctgggcacctcagcttcccagctggaaggtggctcttttactccccactgcacgaggtctaatgtggaagtgaggtagctctcagcaggagaggccactaatgcgtgcaccctggcccaaggaatgaggacatttttacaggtggagatggggaggaaggctgggtgtgggggagggagcatcacttctagaaggaaagaacagcatgaacaaaggaaagaaggaaagcataggacgtgtttaaagcagggaaaatctggttggtggagccttggtgtgtgattgagggaaggggataagctagcgtcaacaggtgcttggggtgaccctaaatggggaggccttaaatgccagagtgagaaatccgtggacactttgtttctgtagcagagtgtgacatgattgtcaccagagctggctttgggaagccaccatgctgagagagagctggctgggctcagaggggcactcagagaagaccaggagacctcaaggaggcctgtgcccaggccagcaatacagaacaggactgcactgccggcatgggccatagaactgcagctggcagagagaaacagcagggcattcctggcagtgggtttaccaaaaatgatgggcagtagagaagcaggctgcttgactagggtagagagaacaaaaggtgggctgcagtgggcagtgggaaggaaggcactggcttagtatctatttactcatttataggctgccatggtataagatacatatacatacacacaagataaagttgtatgtgtatgtgtgtacacacacacatggggaaaataaaggtaggaaaagcaaagaaaagtcagagataaagtcatactcaaaatgtatgccatggccgcatggttgttagaggtggccaaaaagttggctctgagcatcctcacagccaaggcaaggaaagagaatgtgaacttcaggagaagcatggcttttcatagtacttaaaacaaaagaacctctcctgttgtcctcaaataggagccacaaaagcatccttaggatgccagcaagaagttccaaaacagtgtttcttataccaccacaccccacacacccctgtcttaaggcaatccctgtccaggaagagcaattctgtgaggtatcaaagggcctgatcctcagctataattaggtctggtttgatgcaaggctaaaatctcacagtgttggttttgagcccgatgaggaaggcagagggccagcctggctgtgcatttggaaccagtccctgtggtggttctgataagtgcttctttagcccacagcccccgggggcaccagtggaaagggctggcgagggggctgtgcttaggccccatggatgtggcttcttacagtaaccatcctcaggatctaagtgatgtgttctgactaaagcttgaagggtttgctcctgctgccaattaggcaaggcccacatacccctgtgctttgagatgtgaacccagcaggctcttcatctccattgcactttgagtggggctgacaggtaactgggctgaggccagggctgggagctggcatttgagcactggtcgagggaaggcttctgggaaagggactccctggccttggtatagatggtgatcccacggcccaggcaagacaggctttgcttgggtggacaggcgctgggggaagtggacgggtgaagggaagaggaggcaaggtggagttggtattgcatccttcctagcccagccaaaccaagagccaagtccctaggtgtttgcagagaaacagagcagtagccaaagggtacagtgcacagggctaagtggggtggcagcttgtccaggagagtcatcttccttagcccgtccccctgcagtgatcgacatcaagctggacaaaccccaggagcccccggccagcgagggcggctgctcctgctaatgcagagccgacctgtggcttcccatgacactccttgcttgttgtgttgcttcctattggctagcttcctaaggggggagggaaccgagttatcaagatgggaggatttttcttttctctctgtctttaggagtagggtgggatggggagggaggctgggcatcagggatcacatcactcttaacggctgttacttaaacaactattttttggtttggttgtaatatattgtactttattaagattgccaaaaactgttaaaatttaaaaaaaatttaaatcatgtgtatacaattttttgccagataaaaatgtagtcatttttatttgaaagatgtgctttttgtttttgtatatttgtaaacttatagagaaccttttccacacacctcctccttcctgttctctttgaaccattcatcacctctgccttcctcctatccccagcccaataaattaaaacaattaactgagcaaattaattaggcttcagtctggggccatctggccccactctctaggccctactccagttaaatcaaacattggttgaacacatcagcctctgaaaaggtagctctgactcttgtctttccatggccagagtgggtcgtcaacctcgtgtggagctgagaccaaggtctgtgggctctaggcagcccggcagcagcccccagaggaactgctcccacctctccttctctttccctgaaaagccttgaagggggttgagggtacaggcaaccttgtgttctctgtgccctcagggactggcagagcaagaggccatcagaaggacgaggtgctgttggcaattgcagctgcgtggtgcgtggtttatagactggggtgccatgtgtacttctgaaaatattttaaccagcccacccagcagtcagtacacatgcctgggccaagtctaagaaactcagtgtgtgatgttgggcagtgtgccatcctgaagccttcctcctggatgtcagggaagctggaccacctggagttgatcctctgtgatggggaggcgggggggggggggggtgttgtctgcagaaccaccaccttgaaagatccatgttcttagagcctcagctgctaatattgttgagtgctttctggaaaagctgatttgttgctatgttttcaccccagtggcatggcgcagttgaagtctttgtggacatatctttgtggctactgtggctgcgctgtggtcacctgaggatgtggttcaggtggggtctccagaaggctgcttgcccccagagagccatctcttccatttttgattcattcctgagaatggcttagtcctgagaatctgcaaagtctctgaagagaactctctcttcccactaagtgatataacctacttggccagcattccaaatagactcagactcactgccctgagcctgcacagagccaggtgcaatgggcagtgagtctggccaaaatgtaaaccccaccctccctgctgtcattggctctccctccaggctgctgctgggcatgtcatagatgggatgaatgaccatctggggtatggtgggctgaactccacaaggtcgttggaatgaattttgaaacttctcagaaattaatctgaaatggcaggcagtaagtgcagcagaatctggcaggactgatatttgtgcagtgggcctgccacacaccctctgcctaggaggctgtatgccagagctcatctctagcaaggaatttatcttcaggtgaagaagagaggaagcaggatcccactgagcacctcttgcagaaggcaaggaccaatgtttgaacgtgtttcagatgtcatgtgtttagtttttatatgtgtgtacataattatatatagagatagacttgtgtatacaccttccacaaacacatcctcacggagatacatgtgctcaatgtatattcttgtttctcctgctctcaagttggaacttgcattgtgataagttttggaaattcaaaagtactgcaacgtgttgaaataagaaatacttaatattgtcaaataacttgtgattgtcttgccatcaataaaataatgcatagttgtgttaaactacaggcaaacatagcccacgggaatatctccaccatttctctatgtactttatatgcacgggtgtgcatgcctgtgtgggccagtgtccccccaccatgggcacacccccaagtggtgcttgttggaagagtgcttacttacctcgagagaatttacaggagtccacatgacagtgtcctgcctggttggcagcgggggccatcacctgtggcctctgagaccgccccatttacaggaatctgcactgggtctcagtgaatgaacgtatggtagatttttattttcttggcactaaagattagcttttttaaaaaaacatcccataaaacagtagaaactcagttcccttctcaggggcacacacatccaaggcaccgtggactgtgtttccatcctggcctagaggagcagtaaaagatagcatttggtttgacatggccttagtgagtcctgcctttcctagcatgcacacaacatcctctctttgagtttgggttctccccagccccttggcctctgaggctgagggtggcttcctcccatcctcccatctcagtggttccatggcgctcccttcggcacgtgcggtttccgcccctcccttcctggggtgtggaaaggcagccagacctctttttcagaagttgttggttccctgatttttgtcttgagcaggcaccatccctgtccccttgcttgcaggtagaattggcacagagttaaggttccataataaactgttaggtgctcttgaagaagatgtcatggcattgcctcagcaccccagcaagagcattgcatctttgctgaatccagatgggttagcagagggcaaattggaggattcctttgaggaaatgttctcaattgagcaattcagtccctctccccaaagactagacgtgacctggcagattagcaggatcctcttggccttcttttttggggatggtgggagtgaagggggtgaatcttaaaagcttatcaacaaagctcctgttctgcaggcatcaggaaagttgagtgtaagatggaaaaagcaaacagcctatttacaagtggaaacacattggttctgatcactcctaacttgctgggtgatcatacatacatcaacatgaaggtgtgacatcagaatcatgagcaccatggctgcagttgtgtgatccaaggctagttggcttggtagctgttggcagcagtttcccttggtcagaggcctccttgctatctatcgctgctctcttcttgtcatccttaaacattcagtcatgttcccaggtctgaggggagcaatggccagaccagtttcagtatctctggcaacagaaacaaggattgaaatggtggtagttaagagtgcagacacatctggggtgcaacgtctgcatcatcctggtggctagccagtgcggggaggccctgccctgggataccagttgtgacaataaagggatggccctcctggcttcagcatcctgcaggtagagcagcctcattccttcacaagatggaaggcaggtgaggatgtcaggatgagatgggaccaggtagccgaggacagtgaggcatgtctgagccacttgaggggcagctgaacagaaggatgtctgtgtgcatcaaccgagcagattgtgcgcacactcgtttccgaactgcctctccccaaagaatgtgaggcattgtcaccttgttacagctatgtgaagcagagctgtcacaacttttcctgtctacaggcaggaaaaccaggatggagaagggcaacttgcttattaagatcacccagcaagttaggagtgatcagaaccagtgaagtttccatttttcatccattgctgccctgtgtgtgaacaaatgtgactccatatttattacacagcaaggactgctgtgtgtgggtgtgttcctcagaccatctctactctttttggttaggacactaggttcttcccagcatatgagtgagaatattggtggtattttgggctcctctactgcacaagggccagtccccaagtctactctgattgattgtcatgggcacccacacagatcaggacaccctttgaatttttgtttgacatgaactatttaggtgttccaaaaccttgggatctcaatgtgcaaactccttggactccagacccctgtctggttggcactcccagcagtgtgtggtttcatcaggaaatccttgcagcaggggtttagatggttccttcaggaggtgggaagcctccatagcattgaaggccagcctgcatctcgcggtgtgtgtccacttctcccctcactttcccctcacccatccctttaaagtgattggctgtgaggagcacagagggtggcaattccatctgttatgggctcagaagacatagccgccatgttgatttcacattaaactgtgtaaaatgtggaaaagactcagcatgttggtcaaacaataaactgtcctaattctcaaaacaaagcttcttgtctgtgtttaagtggtgcagtcataaatgggggggttcaaaaacagttcctgaagtgtgtgctccacagagtcccttttgtcatgcctgggtggtatgtccactacctaaagccctttgctgctttgcttcttcctcctactggtggagttgggctgtccaccaactccgaaggggtaaagatgggacacactcatgagagtaaatccacacgcattcccctaatctccattctgctgaaaggctgatgggaagggagcctccaggcagaactgagtcaggggtacgatatattccttcatccccactctgcttgccatggctaggggattaggaaggggggagagggtacagggactggatctctcatgcttctggtgattttcagaaagccatttaaaggcaagaacttaaggtgaactataatgacctttgacaacatctagctgccatattccatccccagccccacaccacaccagttaggaacatccctgagtggcccctccaggtctcagttatctccagactaaaagatgctcagaaagccagcacagtcctgggaccaatccaaagaggaacaaaggccaagattaggtaaattgcccttgcccgggaatctcactcttcttcaagtccaacttcactaattacctttccttttaaagcttataaaggttccagaacaccctccaatctgctgccacctcaaggaagccatctttgattagaagagacattgaggccaggagtttgagaacagactggccaacatggtgaaacctcatctctactaaaaattagccaggagtggtcccacaggcctgtaatcccagctacttggggaggctaaggcagaagaatcacttgaacccgggaggcagaggttgcagtgagccgagacggcaccactgccactccagcctgggcgacagagtgagactctgtctcgacaaaacaaaaaaacccttgaaacaatatattcaagtcaacagaacatggccatgtgcctcacacatcagcatcatgggaacactggcacttcagaggccagtggaaaagtggcagtcccgttggggctgcatggctggcagctgaccacaagcccacacagcgcttaggagtcaagtgcagcagtgatggagctcacactactgagagagcagggaaaccacactgaaagggcacgtttcttaacctcagaatggggctactagcctctaaagcaggaattgcgttttgtttagtatttccatggtctgctgcaaggcgtggcctttacccaatggataaatgcgtacaaggctcttgtgagcagtcaagtttctcgaggtttacagttgaagggaagtgggattgttttcctgcgcatttaaatgaaggtaggtgggtgatcacctttccttaaatgtgtgaagggatgagataaagagataggcatcttaattgccactgatggccttcaggtgaggacaggcatgagccaactgaagctttgacaattgtgctgaacccaaaacttcaaaaacaagaaaaaacatagactggctgaaatgatctaagtcaacagagcatggccagcgcttcatacaaggcaggaccacaggggaacactgacagcccaggaggcactgagacagaggcagtgggaagaagtgacagaccccagggactccccaccaacagcagctgctgttgattaggaacccccagtagactgtcaggcacctggtagtggagaggctaccaaggcccggactggagaggagccaaaggaagaaacagtgcagtgcttagacccctctgggtctgcccgtgtccatacccactagggagattccattccagaagtggacatattcaccaacagagtgcctggggctcactcatcacagctgcccctccatgagggcatctcactgcagccttagcagggaacagggtcatttgcattaggcagctgctgtcctaggaggtctcggtgtccatacactgccatgttcccaaggtgtttcaagctcaaaagtctcatctatgtcatacagtcgtgcctagttggcccgtctccaagacctgacatccatccttctactctggccacacctgcccatctcatgaaatgggcctactttagtcaaatgccctcagggccacaaaagggcaccacctgagtggagagagcacatttgacctcccatcaaaacccttcccagttcccaaagactagtcaccatgacctcatcctggcccaaagccacaagaacggaatgcctgctactagtacaggagtaagaagcaaggtcagagttcccatgcctgctgacttgaccctgtcagaaaaactcagcagggtgtgtgccccaagagactttaaaaacaaagtaaaggcacacgtgacactccaggccagatcatctctaggggtgccatgcgactgacaaaagacttattaagcatgcagattcctgaggcaataccagacttgctattgaatcaaattgtctgagagtagggtcctcaaatcagtttaacaagcatcgcaggtaattctgatgcccactaacatttgagaccagtgttccagatagaattatccttttttggaagaccttctttaggccttgaatcaaactcaaacttgcagcccttcttcagtcactttttctggtgtgctgcttcctccaataaagtaagatattaaccagaaaaaaataaaagaggctgagagggacacatgcctctaacagaagcatcaagccactgacttttattcccatgagctcctactatgatgacataacatgtcacatttattgctcttacctacttcctaagttactgcttgcctaataaggaaaagggcaagaaataagagtccaaaagacactcagaacaccagcagcagctttcaagtaaggactcagggtcagggtctcacaactcctccatttcatgtttcatttacattgtcttcgtgctccagcagcaaggctgacatgtgctttggggtaggagcctggagtatttctgccagatggtctgaggtgacgtatactcctagagcccaagtgaccaccagaagggacatgtgagacagcaggcagaggccatacatggaggatcacactccctcagacgtcatcagccccatgctttatcctttgactccccctgatcctcaaggccaggtggggtgcccctgctgcatgctccagagaactgtgggcctctcctaccatggctctcaatgcactgttccataactggcttctcccctggacagagccaccctggtctccttgtaagctttagttgggcttgtccctgagtgtgtggggtaggaataggagtgtgttcttgtgtatgttgcaatctttaggctcaggagacaaggagttagacctgagtcctgacatgtgcactcatttgtactcaccattacattctatttaattgctttgagccagacaggctgttttctttaccatgaaatatactaatcattcaaaaaagccttgtgtttaagaagacagcaaaaaacatcacttcaaaaaggcaactttttttttttcttggcatcaatgaatatgcacttcagaaatctacagagaacttttttcactttgtatttgttccacagcattctagccaggagtacaaaataggagctcttcaagcagcacatgaagatggcccaggagccttcagccatccagagcagcagagcagcacctaaatctccacacacttcccagtataaccactaagaacacactagacccttggcattaggggatttatcatttccagttctattatctgggaatgactccaagggtttgtgacaagcttttgaaacgtaagtgctaagacgagtgtggacaagtcactgagctaatgaagaatagacccactgtctgcttggctctgctattttgtacctgtcttcacatgtggggaaacttcataactgtgcccacaaatcagagaaattcgcaaaggactagacaatgtattgcctgtgaacttcagaggcaactggaaatagtgcaactggaaatcaactagcttcatacataggcggatttgtttccagggaccaaaagcacagaagataagaaaacttttcaggtgatggccatattctcatcatatcctctctgtgtggagtctgcctgttgtcacaaaaaccttgaccctacatcaagttacaccttaacaaagggaagatacaggcatcagataaaaggtacttgtttgaaaggcagccataagggagaactgaacttaaaaaaaaaaaaaaaaaaaattccaagctggtttcaacagtactttgtttccagaacaaagaaatgtttctaaccacatcttgtaccccttcctcatcaactccagactaccacagacctttttccaaaactgtgtgtcacacatccaggtcttgtgctttagagctgcctctcaggcaattttagccagccatttctccaagtcctggatgtcagcagagcccacgtcccctcttccacccttggcactgcactccaggaactccactttgaggggcaactgtgagaattcaaactctttgcctttcttccccagctgagcaggggcagtgctggaactgtccagtgtgctgggggcagcagaacgggtaactcgtaaggtgttgctgtggggcaaaaggaaagaagtcaggaggcaaaatttttatacagcaattaaatcatattagtttctaaacatttcagcactcatttaaaacttaactatagaattgccaattatgctattaagattgttgaataatcctttgcatttataagtccctctcttggacagagaggtgaggtaggtggggcgggctgggggggtcagacctcacagggctagaaggcaggtcagcagtagaccaggtcacaccaactttctttcagcccaaggcccccttctaagaggatctactgaatgaagccgtctaaaaatatatttttaaaatacatgctttaagtgttataaaaacataagtttctgaaagttaagtgtgggtagatagggtatgtatttttatcttgagtctatttggatatggagtttagaaatccaccaactccagattctcatatctaactagggcagaattactattatccaacctctttaaccaccaaaaccttcccaatgtaagtccccttactgccacctgctggccctaataaagggtgcataagcaacactcatttgtcggcctccccttcccctttctgctatccagaagcagaggaatacatgctgccaatcttctttcttacaaaataaagcatttcttgttctgtaaagttgcttcaaaattagtgaagaatccacaggcaaaactaagcaataccttgtttaggaaggaacacacacacacacacacacacacacacacacacacactgtaaaagtatttttaaaaaacaatacaaaactggatattgctgacctcttgagggaaaagcttttggggagaaacaggggccttctaggcatggtggtgagtacataggtattcattttaatattttttaagcttaatgcatgtgacatatatactattataagtaagatattttacaataaaaattttttaaggaaaaaagtaaaacatgtattcagcttttgccacaaggccatgtaaatataatataccgtgttattgagagactatgaaatgcctctaagctaacagggcctaattctcataaatctgagattaaaattagtcagattccgaattttaactgatgttaacctttacaatttgtcaacattttgtttcactgccttttaagaaagcattgcctttcaatgcttttaaaaaaggattggcttctgtattgtttttctctaagtctatagagtgaaaagcaaacagcctatggaaaacatgtgttttaaccacgggagacttggactgtactgttaaaaataacccaagactgattcacaaataacattatgacagttttggcttccccaaaacaattcccaacaatttcaagagaatttttagaaaaacccaaccatccaattgttccaatgtccttattaacctaatggcagcaacagatacaatccaagagagtgagcatcaagagcacaggaggacagggtgataaactcgcagctccagacgggaaaggaaccactgaaaatggcataggcagggctggcaaaattgttctgcaaagagccagaaattaaatattttgtcgcatatttttcttctgttttttacctgccctttaaaaatgtcgatttactcttggcttgcaggcccaggcaggagtttgccaatgcccgaagctgactagattctaccagactctaagctcctgagtacaggaacacatttcctcctacagctgctcccaactgcagtcttggcatccactagatgcactacaggtgcttcttaaatgaataagggagtcagtaagtcatagtggggagaaaagtttctaaaagttgaatttatacagtttttcctcatcagatccttttcaaggccttacacaaaagcaataagaaaacataacttgctttactataaatgttgatcatttcttctacaccagcttttggctagctcttacaaattggcataacgcagaagacatgctagatgccttaaaattcaaaagcttatagctcaatttacaaaccttgaaacactcaaagcaggatatataatattgccaagtattttaacaatctaagaagctataatgtagtatcaaagacttgtagtcttcctcagtgttctgttcttattctgtcaacaataatttccaaagtggcttttaaatgttttaatttcttttttcctgattctcagtttttattttttattatttacatgcatccttaaataccacttcacaggcattattgagtggtgaacaaacacttccactcactgaaataacaccgttctcaagttggcatgtaaacttttttagcttctaaaacctttcaactataaatgatttagtaacaatggtaaaataaattaagtttatggtttcaaaaaaatcttctttccatgaaattttaaaatatctataagcaccctagtaagtttttgtgattccattattttgtaaattatttaacaaatatttatcacactaatcttcagtctataattgtgataatcacataaaaccaaacaaaagaaacatgaatatgctgcttacagtctaagtgttaagatatataattaaccaacaggcctctttcacacttacagttctttctccagctgctgttgaattaactttgctgattttgccattgcaatatctgtaaagaaataaagacactgttgtagtttaaacgagaatgagttttttccccaagacttcttacacagaaggaaaattcctatttaaaccagtaagtttttctctttttttaaaaaaagaccttttatcactagttccttctctatcaaagtaagctttatacttgcactaggggctttcccaagataatgcttataaacatattatgctggtgaccctaaaactgactttagctttccctaaagttctccacaccttatagacctttcaattcaaaacatataagtttactcagtttaacagaaagaaaacctaccagtgctgtgattatgagaagtgccttcacatgccaaaagacagtgccctatctgtcattttaaagtaaacttagcatgtttccaattgatcctaagacggtatgtttaaagcattaagtgtactaaaggtaagaaacaagctctggtttggcacaaagcccatggcaaataaacaataactcccttccttatattcaatcagggaaataaagaggtcaggtaatgacgctaattgcattcccaataaggcattatcaatattatctggtcacttctgagaaatgccttgaactcttcatagaatcagaatttcagatctggaagagacctgaagagatccactagtctgtcttattgtacaggtaacggaactgaagcccagttttattggggattactagaaaagttttcaatggttatcaggttaaaagaaaacaacttcagcaaacttcccttgataaaatgtgctgtacagtaaacttgtttgaaagcagaaactccaccctgcaaaactgtgcatctgatatcacatattgtcaatctgatgaacttaacttggtaaagtaaaataatttataatcagaaaaaacactgtatcaaagaaaaatcagttagcagtcacttggttatcattccttggtcttctggttagaagactggtgaaaaggtaggagtagaaataaattttaagattaaaaatccttcaatttatagttctttacagcaattgtatctcatcctcaataataacaactgtaaataatggaaataattcttagtagcagcaatccccaaaaaactcaattattattgcaagaaaacatgatggcaccttgcttattgcaggctattaagaatgatggtgtattcttcagacccatactgtcaatgaggacttgatacagaaactcagccacatctttcacctctcgctggaatgctgcactatccacaacaaacacaatagccctggagggagaaaacaagaaaaactggcatgtgaacgtgtaacaggacatcattatcttgaaaaactatcctgaacttcttcaaagtcaatcttggtgattaacactcagcagacacacatgcaggtctgtgcatatgttatcatataacataaatcctcatttaacaaggaactattgagtgctactgtgtatcaatgactgaagctgaaaaaagacagtaagaaatgatgcctgtcctccaagacaaatcatcatatagagaaccatatgataaatgccaagacaaaactatgcacatgtgtaacaggaataaagagaaagatcatttaaatgagaccaggtcaaaggcaactttaaggagaatgtaacagttgagttgaatcttagctagaccaaaaattggggcacaggctgtctggaaagtacaggttgagtatccccaatccaaaaatccaaagtctaaaatccaaaacacttctggttccaagcattttggataagggatactcagcctacagtatgttcaagccacaaatacgtgaaacacattccctggggaagtcaaggtaagctggtacacagggagatggggaaatgaaggagaaccaagtcagacagtgaggcgtgacacaatgacctgtggagttcatgcttttctgtcttatgaagaatattggtgcctaaatggaagacaaagcaatcttagagggcgcttgaactagaagcacagtgaccaggtagggcctgaactaaggcagccatagtgggactcctcatgtgacagaaacaaagagatatcaaagctaaagtgcagcagcccagggaaactgcagacaacaggtcttagggggccgggtgcggtggctcacgcctgtaatcccagcactttggggggccgagacaggcagatcacttgaggtcaggagttcgagacaagtctgggcaacatgatgaaacccaatctctactaaaaatataacaattagccagatatggtggcgggagcctgtaatcccagctacttgagagtctgaggcagaagagttacttgaacccagaaggcgaaggttgcagtgaactgagatcatgccactgcactccagcctgggtgacaaagcgaaactccatctcaaagaaaacaaaaaaacaaaaaaaccggccaggcgcggtggctcacgcctgtaatcccagcactttgggaagccgaggcgggcggatcacgaggtcaggagatcgagaccatcctggctaacacggcgaaaccctgtctctcctaaaaatacaaaaaattagcttggtgtgatggcgggtgcctgttgtcccagctactcaggggactgaggcaggagaatggcgtaaacctgggaggcagagcttgcagcgagccaagatcgcgccactgcactccagcctgggcaacagagcgagactccgtctcaaaaaaaaaaaaaaaaatacaagccttatggacaagggtttgaatgcccaggtggagataagagacatgcaatggccaacatgcagctggggagctagaactgaatgccctgcacaaagcctacaacttaaaatagtctcagggaggtcggggcttgcaaaaaaagttcccttagaaacagcgggcctccactgcctcacacagatatagggtatgaatttatactctctccaggtgtaagacccccaaggggaaaggcttacataaaaattgggccagacttattgaagccctatggccccaacagaaggaactatgaaccgcttatggagcaaggctttcatatcctacgggattaaagaaccaccacaatatcaatgatgtgtcactcttgaagaaaggttctggagcaaaaattacaaggcacagaataaaataattatgagggagaataactggtaccccaaagagaataatcagcaccccaaaactaagataataaagctatctataaagtaaatgtttaaaattatttaagaaaatactacaaactacaataaaaaatagaatagtataaaaagaaacaggctggtttgaaaaggtaagtattttagacaaatatagtaaatgatattaataaatcaatggaaaagttaag
